(19) United States
(12) Patent Application Publication
(10) Pub. No.: US 2023/0060373 A1
(43) Pub. Date: Mar. 2, 2023

(54) Antisense Oligonucleotides Targeting ATXN3

(71) Applicant: Hoffmann-La Roche Inc., Little Falls, NJ (US)

(72) Inventors: Heidi Rye Hudlebusch, Bronshoj (DK); Alexander Herbert Stephan, Basel-City (CH); Lykke Pedersen, Kobenhavn NV (DK); Christoffer Sondergaard, Alleroed (DK); Erik Funder, Hillerod (DK)

(21) Appl. No.: 17/540,534

(22) Filed: Dec. 2, 2021

(30) Foreign Application Priority Data
Dec. 3, 2020 (EP) EP20211623.2

(51) Int. Cl. C12N 15/113; A61P 25/28; A61K 31/7115; A61K 31/712; A61K 31/7125

(52) U.S. Cl. CPC C12N 15/113; A61P 25/28; A61K 31/7125; A61K 31/712; A61K 31/7115

(57) ABSTRACT

The present invention relates to antisense LNA oligonucleotides (oligomers) complementary to ATXN3 pre-mRNA sequences, which are capable of inhibiting the expression of ATXN3 protein. Inhibition of ATXN3 expression is beneficial for the treatment of spinocerebellar ataxia.

### CROSS REFERENCE TO RELATED APPLICATIONS

[0001] This application claims benefit of and priority to the European Patent Application EP 20211623.2 filed on Dec. 3, 2020, all of which are incorporated by reference in their entireties where permissible.

### TECHNICAL FIELD OF THE INVENTION

[0002] The present invention relates to antisense LNA oligonucleotides (oligomers) complementary to ATXN3 pre-mRNA sequences, which are capable of inhibiting the expression of ATXN3. Inhibition of ATXN3 expression is beneficial for the treatment of spinocerebellar ataxia, such as spinocerebellar ataxia 3 (Machado-Joseph disease (MJD)).

### REFERENCE TO SEQUENCE LISTING

[0003] The instant application contains a Sequence Listing which has been submitted electronically in ASCII format and is hereby incorporated by reference in its entirety. Said ASCII copy, created on Dec. 3, 2020, is named 067211_014US1_SL.txt and is 623,623 bytes in size.

### BACKGROUND OF THE INVENTION

[0004] Spinocerebellar ataxia type 3 (SCA3), also known as Machado-Joseph disease (MJD), is one of nine polyglutamine expansion diseases and the most common dominantly inherited ataxia in the world. While certain symptoms in SCA3 may respond to symptomatic therapy, there is still no effective treatment for this relentlessly progressive and fatal neurodegenerative disease. The disease is caused by a CAG repeat expansion in the ATXN3 gene that encodes an abnormally long polyglutamine tract in the disease protein, ATXN3 (Ataxin 3). The toxic ataxin-3 protein is associated with aggregates which are frequently observed in the brain tissue of SCA3 patients. Moore et al. reported that antisense oligonucleotides (ASOs) targeting ATXN3 were capable of reducing levels of the pathogenic ATXN3 protein both in human disease fibroblasts and in a mouse model expressing the full-length human mutantATXN3 gene (Moore et al., Mol Ther Nucleic Acids. 2017; 7:200-210). Therefore, ASO-mediated targeting of ATXN3 was suggested as therapeutic approach for SCA3.

[0005] Swayze et al. (Nucleic Acids Res. 2007; 35(2):687-700. Epub 2006 Dec. 19), reports that antisense oligonucleotides containing locked nucleic acid have the potential to improve potency but cause significant toxicity in animals (hepatotoxicity).

[0006] Toonen et al. used antisense oligonucleotides to mask predicted exonic splicing signals of ATXN3, resulting in exon 10 skipping from ATXN3 pre-mRNA. The skipping of exon 10 led to formation of a truncated ataxin-3 protein lacking the toxic polyglutamine expansion, but retaining its ubiquitin binding and cleavage function (Toonen et al., Molecular Therapy—Nucleic Acids, 2017, Volume 8: 232-242).

[0007] WO2013/138353, WO2015/017675, WO2018/089805, WO2019/217708 and WO2020/172559 disclose antisense oligonucleotides targeting human ATXN3 mRNA for use in the treatment of SCA3.

### SUMMARY OF THE INVENTION

[0008] The present invention identifies regions of the ATXN3 transcript (ATXN3) for antisense inhibition in vitro or in vivo, and provides for antisense oligonucleotides, including LNA gapmer oligonucleotides, which target these regions of the ATXN3 pre-mRNA or mature mRNA. The present invention identifies antisense oligonucleotides which inhibit human ATXN3 pre-mRNA or mature mRNA with an improved duration of action, potency and/or efficacy. The present invention identifies oligonucleotides which inhibit human ATXN3 which are useful in the treatment of spinocerebellar ataxia.

[0009] The invention provides for an antisense oligonucleotide, 10-30 nucleotides in length, targeting a mammalian ATXN3 (Ataxin 3) target nucleic acid, wherein the antisense oligonucleotide is capable of inhibiting the expression of mammalian ATXN3 in a cell which is expressing mammalian ATXN3. The mammalian ATXN3 target nucleic acid may be, e.g., a human, monkey or mouse ATXN3 target nucleic acid.

[0010] The invention also provides for an LNA gapmer antisense oligonucleotide, 10-30 nucleotides in length, wherein said antisense oligonucleotide comprises a contiguous nucleotide sequence 10-30 nucleotides in length, wherein the contiguous nucleotide sequence is at least 90% complementary, such as fully complementary, to SEQ ID NO:1, wherein the antisense oligonucleotide is capable of inhibiting the expression of human ATXN3 in a cell which is expressing human ATXN3.

[0011] In one aspect, the invention provides for an antisense oligonucleotide comprising a contiguous nucleotide sequence comprising at least 10, such as at least 12, such as at least 14, such as at least 16 contiguous nucleotides present in an antisense oligonucleotide selected from the group consisting of the compounds shown in Table 11, wherein the antisense oligonucleotide is capable of inhibiting the expression of human ATXN3 in a cell which is expressing human ATXN3; or a pharmaceutically acceptable salt thereof. In some embodiments, the antisense oligonucleotide comprises the contiguous nucleotide sequence of an antisense oligonucleotide selected from the group consisting of the compounds shown in Table 11. In some embodiments, the antisense oligonucleotide is an LNA gapmer antisense oligonucleotide, or a pharmaceutically acceptable salt thereof. Typically, each LNA cytosine is an LNA 5-methyl cytosine. In some embodiments, substantially all, or all, internucleoside linkages between the nucleosides are phosphorothioate internucleoside linkages.

[0012] In one aspect, the invention provides for an antisense oligonucleotide comprising a contiguous nucleotide sequence comprising at least 10, such as at least 12, such as at least 14, such as at least 16 contiguous nucleotides present in SEQ ID NO:1605 except for one or more modified nucleosides and/or one or more modified internucleoside linkages, wherein the antisense oligonucleotide is capable of inhibiting the expression of human ATXN3 in a cell which is expressing human ATXN3; or a pharmaceutically acceptable salt thereof. In some embodiments, the antisense oligonucleotide comprises the contiguous nucleotide sequence of SEQ ID NO:1605.

[0013] In one aspect, the invention provides for an antisense oligonucleotide comprising a contiguous nucleotide sequence comprising at least 10, such as at least 12, such as at least 14, such as at least 16 contiguous nucleotides present in SEQ ID NO:1809 except for one or more modified nucleosides and/or one or more modified internucleoside linkages, wherein the antisense oligonucleotide is capable of inhibiting the expression of human ATXN3 in a cell which is expressing human ATXN3; or a pharmaceutically acceptable salt thereof. In some embodiments, the antisense oligonucleotide comprises the contiguous nucleotide sequence of SEQ ID NO:1809.

[0014] In one aspect, the invention provides for an antisense oligonucleotide comprising a contiguous nucleotide sequence comprising at least 10, such as at least 12, such as at least 14, such as at least 16 contiguous nucleotides present in SEQ ID NO:1810 except for one or more modified nucleosides and/or one or more modified internucleoside linkages, wherein the antisense oligonucleotide is capable of inhibiting the expression of human ATXN3 in a cell which is expressing human ATXN3; or a pharmaceutically acceptable salt thereof. In some embodiments, the antisense oligonucleotide comprises the contiguous nucleotide sequence of SEQ ID NO:1810.

[0015] In one aspect, the invention provides for an antisense oligonucleotide comprising a contiguous nucleotide sequence comprising at least 10, such as at least 12, such as at least 14, such as at least 16 contiguous nucleotides present in SEQ ID NO:1812 except for one or more modified nucleosides and/or one or more modified internucleoside linkages, wherein the antisense oligonucleotide is capable of inhibiting the expression of human ATXN3 in a cell which is expressing human ATXN3; or a pharmaceutically acceptable salt thereof. In some embodiments, the antisense oligonucleotide comprises the contiguous nucleotide sequence of SEQ ID NO:1812.

[0016] In one aspect, the invention provides for an antisense oligonucleotide comprising a contiguous nucleotide sequence comprising at least 10, such as at least 12, such as at least 14, such as at least 16 contiguous nucleotides present in SEQ ID NO:1813 except for one or more modified nucleosides and/or one or more modified internucleoside linkages, wherein the antisense oligonucleotide is capable of inhibiting the expression of human ATXN3 in a cell which is expressing human ATXN3; or a pharmaceutically acceptable salt thereof. In some embodiments, the antisense oligonucleotide comprises the contiguous nucleotide sequence of SEQ ID NO:1813.

[0017] In one aspect, the invention provides for an antisense oligonucleotide comprising the nucleoside base sequence and, optionally, the sugar moiety modifications, of an antisense oligonucleotide selected from the group consisting of Compound ID Nos. 1605_2, 1605_3, 1605_4, 1605_5, 1605_23, 1809_8, 1810_39, 1812_4, 1813_4, 1813_15, and 1813_16, as shown in Table 12.

[0018] In some embodiments, the antisense oligonucleotide is an LNA gapmer antisense oligonucleotide; or a pharmaceutically acceptable salt thereof. Typically, each LNA cytosine is an LNA 5-methyl cytosine. In some embodiments, the LNA nucleosides are beta-D-oxy-LNA nucleosides.

[0019] In some embodiments, substantially all, or all, internucleoside linkages between the nucleosides are phosphorothioate internucleoside linkages.

[0020] In some embodiments, one or more nucleosides are also or alternatively modified to a 2′-sugar-substituted nucleoside, such as a 2′-O-methyl nucleoside.

[0021] More details on these or other nucleoside modifications and/or internucleoside linkage modifications are provided in the present disclosure.

[0022] In one aspect, the invention provides for the antisense oligonucleotides disclosed herein, for example an antisense oligonucleotide selected from the group consisting of the compounds shown in a table in Example 13; or a pharmaceutically acceptable salt thereof.

[0023] In one aspect, the invention provides for the antisense oligonucleotide disclosed herein, for example an antisense oligonucleotide selected from the group consisting of the compounds shown in Table 11; or a pharmaceutically acceptable salt thereof.

[0024] In some embodiments, the antisense oligonucleotide is selected from the group consisting of the compounds shown in Table 12.

[0025] In one aspect, the invention particularly provides for an antisense oligonucleotide selected from the group consisting of Compound ID Nos. 1605_2, 1605_3, 1605_4, 1605_5, 1605_23, 1809_8, 1810_39, 1812_4, 1813_4, 1813_15, and 1813_16; or a pharmaceutically acceptable salt thereof.

[0026] In separate and specific aspects, the invention provides for an antisense oligonucleotide as shown in FIG. 11A, 11B, 11C, 11D, 11E, 11F, 11G, 11H, 11I, 11J or 11K; or a pharmaceutically acceptable salt thereof.

[0027] A oligonucleotide of the invention as referred to or claimed herein may be in the form of a pharmaceutically acceptable salt, such as a sodium or potassium salt.

[0028] In one aspect, the invention provides for a conjugate comprising a oligonucleotide according to the invention, and at least one conjugate moiety covalently attached to said oligonucleotide.

[0029] In one aspect, the invention provides for a pharmaceutical composition comprising the oligonucleotide or conjugate of the invention and a pharmaceutically acceptable diluent, solvent, carrier, salt and/or adjuvant.

[0030] In one aspect, the invention provides for an in vivo or in vitro method for modulating ATXN3 expression in a target cell which is expressing ATXN3, said method comprising administering an oligonucleotide or conjugate or pharmaceutical composition of the invention in an effective amount to said cell.

[0031] In one aspect, the invention provides for a method for treating or preventing a disease comprising administering a therapeutically or prophylactically effective amount of an oligonucleotide, conjugate or the pharmaceutical composition of the invention to a subject suffering from or susceptible to the disease.

[0032] In some embodiments, the disease is spinocerebellar ataxia, such as spinocerebellar ataxia 3, such as Machado-Joseph disease (MJD).

[0033] In one aspect, the invention provides for the oligonucleotide, conjugate or the pharmaceutical composition of the invention for use in medicine.

[0034] In one aspect, the invention provides for the oligonucleotide, conjugate or the pharmaceutical composition of the invention for use in the treatment or prevention of spinocerebellar ataxia, such as spinocerebellar ataxia 3, such as Machado-Joseph disease (MJD).

[0035] In one aspect, the invention provides for the use of the oligonucleotide, conjugate or the pharmaceutical composition of the invention, for the preparation of a medicament for treatment or prevention of spinocerebellar ataxia, such as spinocerebellar ataxia 3 such as Machado-Joseph disease (MJD).

### BRIEF DESCRIPTION OF THE DRAWINGS

[0036] FIG. 1 displays a drawing of the compound 1122_67 (SEQ ID NO:1122).

[0037] FIG. 2 displays a drawing of the compound 1813_1 (SEQ ID NO:1813).

[0038] FIG. 3 displays a drawing of the compound 1856_1 (SEQ ID NO:1856).

[0039] FIG. 4 displays a drawing of the compound 1812_1 (SEQ ID NO:1812).

[0040] FIG. 5 displays a drawing of the compound 1809_2 (SEQ ID NO:1809).

[0041] FIG. 6 displays a drawing of the compound 1607_1 (SEQ ID NO:1607).

[0042] FIG. 7 displays a drawing of the compound 1122_62 (SEQ ID NO:1122).

[0043] FIG. 8 displays a drawing of the compound 1122_33 (SEQ ID NO:1122).

[0044] FIG. 9 portrays the stability of the compounds 1122_67 and 18131, and 5 reference compounds (i.e. compounds 1100673, 1101657, 1102130, 1103014, and 1102987) in a 24 hour SVPD assay.

[0045] FIG. 10A displays a WES analysis of GM06153 cells treated with different ASOs to obtain reduction of wild type Ataxin 3 (55 kDa) and polyQ extended Ataxin 3 (77 kDa). FIG. 10B displays an analysis of band intensity normalized to HPRT. Wild type Ataxin 3 is represented by the band at 55 kDa, and the polyQ extended Ataxin 3 is represented by the band at 77 kDa. Cells have been treated with 10 uM of ASO for 4 days prior to protein analysis. Data represents cells treated with ASOs in triplicates as mean+−SD. SC, scrambled control oligo.

[0046] FIGS. 11A-K display drawings of the compounds in Table 12 (Example 13). FIG. 11A displays a drawing of the compound 1605_2. FIG. 11B displays a drawing of the compound 1605_3. FIG. 11C displays a drawing of the compound 1605_4. FIG. 11D displays a drawing of the compound 1605_5. FIG. 11E displays a drawing of the compound 1605_23. FIG. 11F displays a drawing of the compound 1809_8. FIG. 11G displays a drawing of the compound 1810_39. FIG. 11H displays a drawing of the compound 1812_4. FIG. 11I displays a drawing of the compound 1813_4. FIG. 11J displays a drawing of the compound 1813_15. FIG. 11K displays a drawing of the compound 1813_16.

[0047] The chemical drawings show the protonated form of the antisense oligonucleotide, and it will be understood that each hydrogen on the sulphur atom in the phosphorothioate internucleoside linkage may independently be present or absent. In a salt form, one or more more of the hydrogens may for example be replaced with a cation, such as a metal cation, such as a sodium cation or a potassium cation.

[0048] FIG. 12 displays an image showing raw results from the WES analysis of protein level. Included are compounds 1605_4, 1122_107, 1122_156 and a scrambled control oligo.

[0049] FIG. 13 displays an image showing raw results from the WES analysis of protein level. Included are compounds 1287095, 1102579, 1605_2 and a scrambled control oligo.

[0050] FIG. 14 displays an analysis of band intensity normalized to HPRT. Cells have been treated with 5 μM of ASO for 4 days prior to protein analysis. Data represents cells treated with ASOs in triplicates as mean+−SD. *p-value<0.05; **p-value<0.01.

[0051] FIG. 15 displays a WES analysis of SK-N-AS cells treated with different ASOs to obtain reduction of wild type Ataxin 3 (55 kDa). The loading control used for normalization was HPRT.

[0052] FIG. 16 displays a WES analysis of SK-N-AS cells treated with different reference compound ASOs to obtain reduction of wild type Ataxin 3 (55 kDa). The loading control used for normalization was HPRT.

[0053] FIG. 17 displays an analysis of band intensity normalized to HPRT. Cells were treated with 5 or 15 uM of ASO for 4 days prior to protein analysis. Data represents cells treated with ASOs in triplicates as mean+−SD.

[0054] FIG. 18 displays results from ddPCR analysis showing remaining level of ATXN3 mRNA following treatment with the listed compounds.

### DETAILED DESCRIPTION OF THE INVENTION

### I. Definitions

[0055] It should be appreciated that this disclosure is not limited to the compositions and methods described herein as well as the experimental conditions described, as such may vary. It is also to be understood that the terminology used herein is for the purpose of describing certain embodiments only, and is not intended to be limiting, since the scope of the present disclosure will be limited only by the appended claims.

[0056] Unless defined otherwise, all technical and scientific terms used herein have the same meaning as commonly understood by one of ordinary skill in the art to which this disclosure belongs. Although any compositions, methods and materials similar or equivalent to those described herein can be used in the practice or testing of the present invention. All publications mentioned are incorporated herein by reference in their entirety.

[0057] The use of the terms “a,” “an,” “the,” and similar referents in the context of describing the presently claimed invention (especially in the context of the claims) are to be construed to cover both the singular and the plural, unless otherwise indicated herein or clearly contradicted by context.

[0058] Recitation of ranges of values herein are merely intended to serve as a shorthand method of referring individually to each separate value falling within the range, unless otherwise indicated herein, and each separate value is incorporated into the specification as if it were individually recited herein.

[0059] Use of the term “about” is intended to describe values either above or below the stated value in a range of approx. +/−10%; in other embodiments the values may range in value either above or below the stated value in a range of approx. +/−5%; in other embodiments the values may range in value either above or below the stated value in a range of approx. +/−2%; in other embodiments the values may range in value either above or below the stated value in a range of approx. +/−1%. The preceding ranges are intended to be made clear by context, and no further limitation is implied. All methods described herein can be performed in any suitable order unless otherwise indicated herein or otherwise clearly contradicted by context. The use of any and all examples, or exemplary language (e.g., “such as”) provided herein, is intended merely to better illuminate the invention and does not pose a limitation on the scope of the invention unless otherwise claimed. No language in the specification should be construed as indicating any non-claimed element as essential to the practice of the invention.

[0060] As used herein, the terms “treat,” “treating,” “treatment” and “therapeutic use” refer to the elimination, reduction or amelioration of one or more symptoms of a disease or disorder. Specifically, the term “treatment” may refer to both treatment of an existing disease (e.g. a disease or disorder as herein referred to), or prevention of a disease (i.e. prophylaxis). It will therefore be recognized that treatment as referred to herein may, in some embodiments, be prophylactic. As used herein, a “therapeutically effective amount” refers to that amount of a therapeutic agent sufficient to mediate a clinically relevant elimination, reduction or amelioration of such symptoms. An effect is clinically relevant if its magnitude is sufficient to impact the health or prognosis of a recipient subject. A therapeutically effective amount may refer to the amount of therapeutic agent sufficient to delay or minimize the onset of disease. A therapeutically effective amount may also refer to the amount of the therapeutic agent that provides a therapeutic benefit in the treatment or management of a disease.

[0061] The term “oligonucleotide” as used herein is defined as it is generally understood by the skilled person as a molecule comprising two or more covalently linked nucleosides. Such covalently bound nucleosides may also be referred to as nucleic acid molecules or oligomers. Oligonucleotides are commonly made in the laboratory by solid-phase chemical synthesis followed by purification. When referring to a sequence of the oligonucleotide, reference is made to the sequence or order of nucleobase moieties, or modifications thereof, of the covalently linked nucleotides or nucleosides. The oligonucleotide of the invention is man-made, and is chemically synthesized, and is typically purified or isolated. The oligonucleotide of the invention may comprise one or more modified nucleosides or nucleotides.

[0062] The term “Antisense oligonucleotide” as used herein is defined as oligonucleotides capable of modulating expression of a target gene by hybridizing to a target nucleic acid, in particular to a contiguous sequence on a target nucleic acid. The antisense oligonucleotides are not essentially double stranded and are therefore not siRNAs or shRNAs. Preferably, the antisense oligonucleotides of the present invention are single stranded. It is understood that single stranded oligonucleotides of the present invention can form hairpins or intermolecular duplex structures (duplex between two molecules of the same oligonucleotide), as long as the degree of intra or inter self-complementarity is less than 50% across of the full length of the oligonucleotide.

[0063] The term “contiguous nucleotide sequence” refers to the region of the oligonucleotide which is complementary to the target nucleic acid. The term is used interchangeably herein with the term “contiguous nucleobase sequence” and the term “oligonucleotide motif sequence” also referred to as “motif sequence”. The “motif sequence” may also be referred to as the “Oligonucleotide Base Sequence”. In some embodiments all the nucleotides of the oligonucleotide constitute the contiguous nucleotide sequence. In some embodiments the oligonucleotide comprises the contiguous nucleotide sequence, such as a F-G-F′ gapmer region, and may optionally comprise further nucleotide(s), for example a nucleotide linker region which may be used to attach a functional group to the contiguous nucleotide sequence. The nucleotide linker region may or may not be complementary to the target nucleic acid. Advantageously, the contiguous nucleotide sequence is 100% complementary to the target nucleic acid.

[0064] The term “modified oligonucleotide” describes an oligonucleotide comprising one or more modified nucleosides and/or modified internucleoside linkages. The term chimeric” oligonucleotide is a term that has been used in the literature to describe oligonucleotides with modified nucleosides.

[0065] The term “nucleotides” refers to the building blocks of oligonucleotides and polynucleotides, and for the purposes of the present invention include both naturally occurring and non-naturally occurring nucleotides. In nature, nucleotides, such as DNA and RNA nucleotides comprise a ribose sugar moiety, a nucleobase moiety and one or more phosphate groups (which is absent in nucleosides). Nucleosides and nucleotides may also interchangeably be referred to as “units” or “monomers”.

[0066] The term “nucleobase” refers to the purine (e.g. adenine and guanine) and pyrimidine (e.g. uracil, thymine and cytosine) moieties present in nucleosides and nucleotides which form hydrogen bonds in nucleic acid hybridization. In the context of the present invention the term nucleobase also encompasses modified nucleobases which may differ from naturally occurring nucleobases, but are functional during nucleic acid hybridization. In this context “nucleobase” refers to both naturally occurring nucleobases such as adenine, guanine, cytosine, thymidine, uracil, xanthine and hypoxanthine, as well as non-naturally occurring variants. Such variants are for example described in Hirao et al (2012) Accounts of Chemical Research vol 45 page 2055 and Bergstrom (2009) Current Protocols in Nucleic Acid Chemistry Suppl. 37 1.4.1.

[0067] In some embodiments, the “nucleobase moiety” is modified by changing the purine or pyrimidine into a modified purine or pyrimidine, such as substituted purine or substituted pyrimidine, such as a nucleobased selected from isocytosine, pseudoisocytosine, 5-methyl cytosine, 5-thiozolo-cytosine, 5-propynyl-cytosine, 5-propynyl-uracil, 5-bromouracil 5-thiazolo-uracil, 2-thio-uracil, 2′thio-thymine, inosine, diaminopurine, 6-aminopurine, 2-aminopurine, 2,6-diaminopurine and 2-chloro-6-aminopurine.

[0068] The nucleobase moieties may be indicated by the letter code for each corresponding nucleobase, e.g. A, T, G, C or U, wherein each letter may optionally include modified nucleobases of equivalent function. For example, in the exemplified oligonucleotides, the nucleobase moieties are selected from A, T, G, C, and 5-methyl cytosine. Optionally, for LNA gapmers, 5-methyl cytosine LNA nucleosides may be used.

[0069] The term “modified nucleoside” or “nucleoside modification” as used herein refers to nucleosides modified as compared to the equivalent DNA or RNA nucleoside by the introduction of one or more modifications of the sugar moiety or the (nucleo)base moiety. In a preferred embodiment, the modified nucleoside comprises a modified sugar moiety. The term modified nucleoside may also be used herein interchangeably with the term “nucleoside analogue” or modified “units” or modified “monomers”. Nucleosides with an unmodified DNA or RNA sugar moiety are termed DNA or RNA nucleosides herein. Nucleosides with modifications in the base region of the DNA or RNA nucleoside are still generally termed DNA or RNA if they allow Watson Crick base pairing.

[0070] The oligomer of the invention may comprise one or more nucleosides which have a modified sugar moiety, i.e. a modification of the sugar moiety when compared to the ribose sugar moiety found in DNA and RNA.

[0071] Numerous nucleosides with modification of the ribose sugar moiety have been made, primarily with the aim of improving certain properties of oligonucleotides, such as affinity and/or nuclease resistance.

[0072] Such modifications include those where the ribose ring structure is modified, e.g. by replacement with a hexose ring (HNA), or a bicyclic ring, which typically have a biradicle bridge between the C2 and C4 carbons on the ribose ring (LNA), or an unlinked ribose ring which typically lacks a bond between the C2 and C3 carbons (e.g. UNA). Other sugar modified nucleosides include, for example, bicyclohexose nucleic acids (WO2011/017521) or tricyclic nucleic acids (WO2013/154798). Modified nucleosides also include nucleosides where the sugar moiety is replaced with a non-sugar moiety, for example in the case of peptide nucleic acids (PNA), or morpholino nucleic acids.

[0073] As used herein, “sugar modifications” also include modifications made via altering the substituent groups on the ribose ring to groups other than hydrogen, or the 2′-OH group naturally found in DNA and RNA nucleosides. Substituents may, for example be introduced at the 2′, 3′, 4′ or 5′ positions.

[0074] As used herein, a “2′ sugar modified nucleoside” refers to a nucleoside which has a substituent other than H or —OH at the 2′ position (2′ substituted nucleoside) or comprises a 2′ linked biradicle capable of forming a bridge between the 2′ carbon and a second carbon in the ribose ring, such as LNA (2′-4′ biradicle bridged) nucleosides.

[0075] Indeed, much focus has been spent on developing 2′ substituted nucleosides, and numerous 2′ substituted nucleosides have been found to have beneficial properties when incorporated into oligonucleotides. For example, the 2′ modified sugar may provide enhanced binding affinity and/or increased nuclease resistance to the oligonucleotide. Examples of 2′ substituted modified nucleosides are 2′-O-alkyl-RNA, 2′-O-methyl-RNA, 2′-alkoxy-RNA, 2′-O-methoxyethyl-RNA (MOE), 2′-amino-DNA, 2′-Fluoro-RNA, and 2′-F-ANA nucleoside. For further examples, please see e.g. Freier & Altmann; Nucl. Acid Res., 1997, 25, 4429-4443 and Uhlmann; Curr. Opinion in Drug Development, 2000, 3(2), 293-213, and Deleavey and Damha, Chemistry and Biology 2012, 19, 937. Below are illustrations of some 2′ substituted modified nucleosides.

[chemical structure]

[0076] In relation to the present invention 2′ substituted does not include 2′ bridged molecules like LNA.

[0077] As used herein, a “Locked Nucleic Acid (LNA) nucleoside” is a 2′-modified nucleoside which comprises a biradical linking the C2′ and C4′ of the ribose sugar ring of said nucleoside (also referred to as a “2′-4′ bridge”), which restricts or locks the conformation of the ribose ring. These nucleosides are also termed bridged nucleic acid or bicyclic nucleic acid (BNA) in the literature. The locking of the conformation of the ribose is associated with an enhanced affinity of hybridization (duplex stabilization) when the LNA is incorporated into an oligonucleotide for a complementary RNA or DNA molecule. This can be routinely determined by measuring the melting temperature of the oligonucleotide/complement duplex.

[0078] Non limiting, exemplary LNA nucleosides are disclosed in WO 99/014226, WO 00/66604, WO 98/039352, WO 2004/046160, WO 00/047599, WO 2007/134181, WO 2010/077578, WO 2010/036698, WO 2007/090071, WO 2009/006478, WO 2011/156202, WO 2008/154401, WO 2009/067647, WO 2008/150729, Morita et al., Bioorganic & Med. Chem. Lett. 12, 73-76, Seth et al. J. Org. Chem. 2010, Vol 75(5) pp. 1569-81, and Mitsuoka et al., Nucleic Acids Research 2009, 37(4), 1225-1238, and Wan and Seth, J. Medical Chemistry 2016, 59, 9645-9667.

[0079] Further non limiting, exemplary LNA nucleosides are disclosed in Scheme 1:

[chemical structure]

[0080] Particular LNA nucleosides are beta-D-oxy-LNA, 6′-methyl-beta-D-oxy LNA such as (S)-6′-methyl-beta-D-oxy-LNA (ScET) and ENA. A particularly advantageous LNA is beta-D-oxy-LNA.

[0081] As used herein, the term “modified internucleoside linkage” is defined as generally understood by the skilled person as linkages other than phosphodiester (PO) linkages, that covalently couples two nucleosides together. The oligonucleotides of the invention may therefore comprise modified internucleoside linkages. In some embodiments, the modified internucleoside linkage increases the nuclease resistance of the oligonucleotide compared to a phosphodiester linkage. For naturally occurring oligonucleotides, the internucleoside linkage includes phosphate groups creating a phosphodiester bond between adjacent nucleosides. Modified internucleoside linkages are particularly useful in stabilizing oligonucleotides for in vivo use, and may serve to protect against nuclease cleavage at regions of DNA or RNA nucleosides in the oligonucleotide of the invention, for example within the gap region of a gapmer oligonucleotide, as well as in regions of modified nucleosides, such as region F and F′.

[0082] In an embodiment, the oligonucleotide comprises one or more internucleoside linkages modified from the natural phosphodiester, such one or more modified internucleoside linkages that is for example more resistant to nuclease attack. Nuclease resistance may be determined by incubating the oligonucleotide in blood serum or by using a nuclease resistance assay (e.g. snake venom phosphodiesterase (SVPD)), both are well known in the art. Internucleoside linkages which are capable of enhancing the nuclease resistance of an oligonucleotide are referred to as nuclease resistant internucleoside linkages. In some embodiments at least 50% of the internucleoside linkages in the oligonucleotide, or contiguous nucleotide sequence thereof, are modified, such as at least 60%, such as at least 70%, such as at least 80 or such as at least 90% of the internucleoside linkages in the oligonucleotide, or contiguous nucleotide sequence thereof, are nuclease resistant internucleoside linkages. In some embodiments all of the internucleoside linkages of the oligonucleotide, or contiguous nucleotide sequence thereof, are nuclease resistant internucleoside linkages. It will be recognized that, in some embodiments the nucleosides which link the oligonucleotide of the invention to a non-nucleotide functional group, such as a conjugate, may be phosphodiester.

[0083] A preferred modified internucleoside linkage is phosphorothioate. Phosphorothioate internucleoside linkages are particularly useful due to nuclease resistance, beneficial pharmacokinetics and ease of manufacture. In some embodiments at least 50% of the internucleoside linkages in the oligonucleotide, or contiguous nucleotide sequence thereof, are phosphorothioate, such as at least 60%, such as at least 70%, such as at least 80% or such as at least 90% of the internucleoside linkages in the oligonucleotide, or contiguous nucleotide sequence thereof, are phosphorothioate. In some embodiments all of the internucleoside linkages of the oligonucleotide, or contiguous nucleotide sequence thereof, are phosphorothioate.

[0084] Nuclease resistant linkages, such as phosphorothioate linkages, are particularly useful in oligonucleotide regions capable of recruiting nuclease when forming a duplex with the target nucleic acid, such as region G for gapmers. Phosphorothioate linkages may, however, also be useful in non-nuclease recruiting regions and/or affinity enhancing regions such as regions F and F′ for gapmers. Gapmer oligonucleotides may, in some embodiments comprise one or more phosphodiester linkages in region F or F′, or both region F and F′, which the internucleoside linkage in region G may be fully phosphorothioate.

[0085] Advantageously, all the internucleoside linkages in the contiguous nucleotide sequence of the oligonucleotide are phosphorothioate linkages.

[0086] It is recognized that, as disclosed in EP2 742 135, antisense oligonucleotide may comprise other internucleoside linkages (other than phosphodiester and phosphorothioate), for example alkyl phosphonate/methyl phosphonate internucleosides, which according to EP2 742 135 may for example be tolerated in an otherwise DNA phosphorothioate gap region.

[0087] As used herein, “phosphorothioate linkages” refer to internucleoside phosphate linkages where one of the non-bridging oxygens has been substituted with a sulfur. The substitution of one of the non-bridging oxygens with a sulfur introduces a chiral center, and as such within a single phosphorothioate oligonucleotide, each phosphorothioate internucleoside linkage will be either in the S (Sp) or R (Rp) stereoisoforms. Such internucleoside linkages are referred to as “chiral internucleoside linkages”. By comparison, phosphodiester internucleoside linkages are non-chiral as they have two non-terminal oxygen atoms.

[0088] The designation of the chirality of a stereocenter is determined by standard Cahn-Ingold-Prelog rules (CIP priority rules) first published in Cahn, R. S.; Ingold, C. K.; Prelog, V. (1966). “Specification of Molecular Chirality”. Angewandte Chemie International Edition. 5 (4): 385-415. doi:10.1002/anie.196603851.

[0089] During standard oligonucleotide synthesis, the stereoselectivity of the coupling and the following sulfurization is not controlled. For this reason, when producing an oligonucleotide by standard oligonucleotide synthetic methods, the stereoconfiguration of any specific phosphorothioate internucleoside linkage introduced may become either Sp or Rp. The resulting preparation of such an oligonucleotide may therefore contain as many as 2′ different individual phosphorothioate diastereoisomers, where X is the number of phosphorothioate internucleoside linkages. Such oligonucleotides are referred to as “stereorandom phosphorothioate oligonucleotides” herein, and do not contain any stereodefined internucleoside linkages. Stereorandom phosphorothioate oligonucleotides are therefore mixtures of individual diastereoisomers originating from the non-stereodefined synthesis. In this context the mixture is defined as up to 2^{X} different phosphorothioate diastereoisomers. A stereorandom phosphorothioate internucleoside linkage may also be referred to as a stereo-undefined phosphorothioate internucleoside linkage or, using HELM-annotations, [sP] (see Example 13).

[0090] As used herein, a “stereodefined internucleoside linkage” refers to an internucleoside linkage which introduces a specific chiral center into the oligonucleotide, which exists in predominantly one stereoisomeric form, either R or S within a population of individual oligonucleotide molecules.

[0091] It should be recognized that stereoselective oligonucleotide synthesis methods used in the art typically provide at least about 90% or at least about 95% stereoselectivity at each internucleoside linkage stereocenter, and as such up to about 10%, such as about 5% of oligonucleotide molecules may have the alternative stereo isomeric form.

In some embodiments the stereoselectivity of each stereodefined phosphorothioate stereocenter is at least about 90%. In some embodiments the stereoselectivity of each stereodefined phosphorothioate stereocenter is at least about 95%.

[0092] As used herein, “stereodefined phosphorothioate linkages” refer to phosphorothioate linkages which have been chemically synthesized in either the Rp or Sp configuration within a population of individual oligonucleotide molecules, such as at least about 90% or at least about 95% stereoselectivity at each stereocenter (either Rp or Sp), and as such up to about 10%, such as about 5% of oligonucleotide molecules may have the alternative stereo isomeric form. The stereo configurations of the phosphorothioate internucleoside linkages are presented below

[chemical structure]

where the 3′ R group represents the 3′ position of the adjacent nucleoside (a 5′ nucleoside), and the 5′ R group represents the 5′ position of the adjacent nucleoside (a 3′ nucleoside).

[0093] Rp internucleoside linkages may also be represented as srP, and Sp internucleoside linkages may be represented as ssP herein.

[0094] In some embodiments the stereoselectivity of each stereodefined phosphorothioate stereocenter is at least about 97%. In some embodiments the stereoselectivity of each stereodefined phosphorothioate stereocenter is at least about 98%. In some embodiments the stereoselectivity of each stereodefined phosphorothioate stereocenter is at least about 99%.

[0095] In some embodiments a stereoselective internucleoside linkage is in the same stereoisomeric form in at least 97%, such as at least 98%, such as at least 99%, or (essentially) all of the oligonucleotide molecules present in a population of the oligonucleotide molecule. Stereoselectivity can be measured in a model system only having an achiral backbone (i.e. phosphodiesters) it is possible to measure the stereoselectivity of each monomer by e.g. coupling a stereodefined monomer to the following model-system “5′ t-po-t-po-t-po 3′”. The result of this will then give: 5′ DMTr-t-srp-t-po-t-po-t-po 3′ or 5′ DMTr-t-ssp-t-po-t-po-t-po 3′ which can be separated using HPLC. The stereoselectivity is determined by integrating the UV signal from the two possible compounds and giving a ratio of these e.g. 98:2, 99:1 or >99:1.

[0096] It will be understood that the stereo % purity of a specific single diastereoisomer (a single stereodefined oligonucleotide molecule) will be a function of the coupling selectivity for the defined stereocenter at each internucleoside position, and the number of stereodefined internucleoside linkages to be introduced. By way of example, if the coupling selectivity at each position is 97%, the resulting purity of the stereodefined oligonucleotide with 15 stereodefined internucleoside linkages will be 0.97¹⁵, i.e. 63% of the desired diastereoisomer as compared to 37% of the other diastereoisomers. The purity of the defined diastereoisomer may after synthesis be improved by purification, for example by HPLC, such as ion exchange chromatography or reverse phase chromatography.

[0097] In some embodiments, a stereodefined oligonucleotide refers to a population of an oligonucleotide wherein at least about 40%, such as at least about 50% of the population is of the desired diastereoisomer.

[0098] Alternatively stated, in some embodiments, a stereodefined oligonucleotide refers to a population of oligonucleotides wherein at least about 40%, such as at least about 50%, of the population consists of the desired (specific) stereodefined internucleoside linkage motif (also termed stereodefined motif).

[0099] For stereodefined oligonucleotides which comprise both stereorandom and stereodefined internucleoside stereocenters, the purity of the stereodefined oligonucleotide is determined with reference to the % of the population of the oligonucleotide which retains the defined stereodefined internucleoside linkage motif(s), the stereorandom linkages are disregarded in the calculation.

[0100] As used herein, a “stereodefined oligonucleotide” refers to an oligonucleotide wherein at least one of the internucleoside linkages is a stereodefined internucleoside linkage.

[0101] As used herein, a “stereodefined phosphorothioate oligonucleotide” refers to an oligonucleotide wherein at least one of the internucleoside linkages is a stereodefined phosphorothioate internucleoside linkage.

[0102] As used herein, the term “complementarity” describes the capacity for Watson-Crick base-pairing of nucleosides/nucleotides. Watson-Crick base pairs are guanine (G)—cytosine (C) and adenine (A)—thymine (T)/uracil (U). It will be understood that oligonucleotides may comprise nucleosides with modified nucleobases, for example 5-methyl cytosine is often used in place of cytosine, and as such the term complementarity encompasses Watson Crick base-paring between non-modified and modified nucleobases (see for example Hirao et al (2012) Accounts of Chemical Research vol 45 page 2055 and Bergstrom (2009) Current Protocols in Nucleic Acid Chemistry Suppl. 37 1.4.1).

[0103] As used herein, the term “% complementary” refers to the number of nucleotides in percent of a contiguous nucleotide sequence in a nucleic acid molecule (e.g. oligonucleotide) which, at a given position, are complementary to (i.e. form Watson Crick base pairs with) a contiguous sequence of nucleotides, at a given position of a separate nucleic acid molecule (e.g. the target nucleic acid or target sequence). The percentage is calculated by counting the number of aligned bases that form pairs between the two sequences (when aligned with the target sequence 5′-3′ and the oligonucleotide sequence from 3′-5′), dividing by the total number of nucleotides in the oligonucleotide and multiplying by 100. In such a comparison a nucleobase/nucleotide which does not align (form a base pair) is termed a mismatch. Preferably, insertions and deletions are not allowed in the calculation of % complementarity of a contiguous nucleotide sequence.

[0104] As used herein, the term “fully complementary” refers to 100% complementarity.

[0105] As used herein, the term “identity” refers to the proportion of nucleotides (expressed in percent) of a contiguous nucleotide sequence in a nucleic acid molecule (e.g. oligonucleotide) which across the contiguous nucleotide sequence, are identical to a reference sequence (e.g. a sequence motif). The percentage of identity is thus calculated by counting the number of aligned bases that are identical (a match) between two sequences (e.g. in the contiguous nucleotide sequence of the compound of the invention and in the reference sequence), dividing that number by the total number of nucleotides in the aligned region and multiplying by 100. Therefore, Percentage of Identity=(Matches×100)/Length of aligned region (e.g. the contiguous nucleotide sequence). Insertions and deletions are not allowed in the calculation the percentage of identity of a contiguous nucleotide sequence. It will be understood that in determining identity, chemical modifications of the nucleobases are disregarded as long as the functional capacity of the nucleobase to form Watson Crick base pairing is retained (e.g. 5-methyl cytosine is considered identical to a cytosine for the purpose of calculating % identity).

[0106] As used herein, the term “hybridizing” or “hybridizes” refers to two nucleic acid strands (e.g. an oligonucleotide and a target nucleic acid) forming hydrogen bonds between base pairs on opposite strands thereby forming a duplex. The affinity of the binding between two nucleic acid strands is the strength of the hybridization. It is often described in terms of the melting temperature (Tₘ) defined as the temperature at which half of the oligonucleotides are duplexed with the target nucleic acid. At physiological conditions Tₘ is not strictly proportional to the affinity (Mergny and Lacroix, 2003, Oligonucleotides 13:515-537). The standard state Gibbs free energy ΔG° is a more accurate representation of binding affinity and is related to the dissociation constant (K_{d}) of the reaction by ΔG°=−RT ln(K_{d}), where R is the gas constant and T is the absolute temperature. Therefore, a very low ΔG° of the reaction between an oligonucleotide and the target nucleic acid reflects a strong hybridization between the oligonucleotide and target nucleic acid. ΔG° is the energy associated with a reaction where aqueous concentrations are 1M, the pH is 7, and the temperature is 37° C. The hybridization of oligonucleotides to a target nucleic acid is a spontaneous reaction and for spontaneous reactions ΔG° is less than zero. ΔG° can be measured experimentally, for example, by use of the isothermal titration calorimetry (ITC) method as described in Hansen et al., 1965, Chem. Comm. 36-38 and Holdgate et al., 2005, Drug Discov Today. The skilled person will know that commercial equipment is available for ΔG° measurements. ΔG° can also be estimated numerically by using the nearest neighbor model as described by SantaLucia, 1998, Proc Natl Acad Sci USA. 95: 1460-1465 using appropriately derived thermodynamic parameters described by Sugimoto et al., 1995, Biochemistry 34:11211-11216 and McTigue et al., 2004, Biochemistry 43:5388-5405. In order to have the possibility of modulating its intended nucleic acid target by hybridization, oligonucleotides of the present invention hybridize to a target nucleic acid with estimated ΔG° values below −10 kcal for oligonucleotides that are 10-30 nucleotides in length. In some embodiments the degree or strength of hybridization is measured by the standard state Gibbs free energy ΔG°. The oligonucleotides may hybridize to a target nucleic acid with estimated ΔG° values below the range of −10 kcal, such as below −15 kcal, such as below −20 kcal and such as below −25 kcal for oligonucleotides that are 8-30 nucleotides in length. In some embodiments the oligonucleotides hybridize to a target nucleic acid with an estimated ΔG° value of −10 to −60 kcal, such as −12 to −40, such as from −15 to −30 kcal or −16 to −27 kcal such as −18 to −25 kcal.

[0107] As used herein, the term “target nucleic acid” refers to the nucleic acid which encodes a mammalian ATXN3 protein and may for example be a gene, a ATXN3 RNA, a mRNA, a pre-mRNA, a mature mRNA or a cDNA sequence. The target may therefore be referred to as an “ATXN3 target nucleic acid”.

[0108] In some embodiments, the target nucleic acid encodes a human ATXN3 protein, such as the human ATXN3 gene encoding the pre-mRNA sequence provided herein as SEQ ID NO:1. Thus, the target nucleic acid may be SEQ ID NO:1.

[0109] In some embodiments, the target nucleic acid encodes a mouse ATXN3 protein. Suitably, the target nucleic acid encoding a mouse ATXN3 protein comprises a sequence as shown in SEQ ID NO: 3.

[0110] In some embodiments, the target nucleic acid encodes a cynomolgus monkey ATXN3 protein. Suitably, the target nucleic acid encoding a cynomolgus monkey ATXN3 protein comprises a sequence as shown in SEQ ID NO: 2.

[0111] If employing the oligonucleotide of the invention in research or diagnostics the target nucleic acid may be a cDNA or a synthetic nucleic acid derived from DNA or RNA.

[0112] For in vivo or in vitro application, the oligonucleotide of the invention is typically capable of inhibiting the expression of the ATXN3 target nucleic acid in a cell which is expressing the ATXN3 target nucleic acid. The contiguous sequence of nucleobases of the oligonucleotide of the invention is typically complementary to the ATXN3 target nucleic acid, as measured across the length of the oligonucleotide, optionally with the exception of one or two mismatches, and optionally excluding nucleotide based linker regions which may link the oligonucleotide to an optional functional group such as a conjugate, or other non-complementary terminal nucleotides (e.g. region D′ or D″). The target nucleic acid is a messenger RNA, such as a mature mRNA or a pre-mRNA which encodes mammalian ATXN3 protein, such as human ATXN3, e.g. the human ATXN3 pre-mRNA sequence, such as that disclosed as SEQ ID NO:1, or ATXN3 mature mRNA. Further, the target nucleic acid may be a cynomolgus monkey ATXN3 pre-mRNA sequence, such as that disclosed as SEQ ID NO:1, or a cynomolgus monkey ATXN3 mature mRNA. Further, the target nucleic acid may be a mouse ATXN3 pre-mRNA sequence, such as that disclosed as SEQ ID NO:3, or mouse ATXN3 mature mRNA. SEQ ID NOs:1-3 are DNA sequences—it will be understood that target RNA sequences have uracil (U) bases in place of the thymidine bases (T).

TABLE 1
Target nucleic acids

| Target Nucleic Acid | Sequence ID |
|---|---|
| ATXN3 Homo sapiens pre-mRNA | SEQ ID NO: 1 |
| ATXN3 Macaca fascicularis pre-mRNA | SEQ ID NO: 2 |
| ATXN3 Mus musculus mRNA | SEQ ID NO: 3 |

[0113] In some embodiments, the oligonucleotide of the invention targets SEQ ID NO:1.

[0114] In some embodiments, the oligonucleotide of the invention targets SEQ ID NO:2.

[0115] In some embodiments, the oligonucleotide of the invention targets SEQ ID NO:3.

[0116] In some embodiments, the oligonucleotide of the invention targets SEQ ID NO:1 and SEQ ID NO:2.

[0117] In some embodiments, the oligonucleotide of the invention targets SEQ ID NO:1 and SEQ ID NO:3.

[0118] In some embodiments, the oligonucleotide of the invention targets SEQ ID NO:1, SEQ ID NO:2 and SEQ ID NO:3.

[0119] As used herein, the term “target sequence” refers to a sequence of nucleotides present in the target nucleic acid which comprises the nucleobase sequence which is complementary to the oligonucleotide of the invention. In some embodiments, the target sequence consists of a region on the target nucleic acid which is complementary to the contiguous nucleotide sequence of the oligonucleotide of the invention.

[0120] Herein are provided numerous target sequence regions, as defined by regions of the human ATXN3 pre-mRNA (using SEQ ID NO:1 as a reference) which may be targeted by the oligonucleotides of the invention.

[0121] In some embodiments the target sequence is longer than the complementary sequence of a single oligonucleotide, and may, for example represent a preferred region of the target nucleic acid which may be targeted by several oligonucleotides of the invention.

[0122] The oligonucleotide of the invention comprises a contiguous nucleotide sequence which is complementary to or hybridizes to the target nucleic acid, such as a sub-sequence of the target nucleic acid, such as a target sequence described herein.

[0123] The oligonucleotide comprises a contiguous nucleotide sequence which are complementary to a target sequence present in the target nucleic acid molecule. The contiguous nucleotide sequence (and therefore the target sequence) comprises at least 10 contiguous nucleotides, such as 9, 10, 11, 12, 13, 14, 15, 16, 17, 18, 19, 20, 21, 22, 23, 24, 25, 26, 27, 28, 29 or 30 contiguous nucleotides, such as from 12-25, such as from 14-18 contiguous nucleotides.

[0124] As used herein, the term “target sequence region” refers to an antisense oligonucleotide, 10-30 nucleotides in length, wherein said antisense oligonucleotide comprises a contiguous nucleotide sequence 10-30 nucleotides in length, wherein the contiguous nucleotide sequence is at least 90% complementary to a region of SEQ ID NO:1. The region of SEQ ID NO:1 to which the antisense oligonucleotide of the invention is complementary to is referred to as the target sequence region.

[0125] In some embodiments the target sequence region is AAGAGTAAAATATGGGT (SEQ ID NO:1093).

[0126] In some embodiments the target sequence region is GAATGTAAAAGTGTACAG (SEQ ID NO:1094).

[0127] In some embodiments the target sequence region is GGAATGTAAAAGTGTACA (SEQ ID NO:1095).

[0128] In some embodiments the target sequence region is GGGAATGTAAAAGTGTAC (SEQ ID NO:1096).

[0129] In some embodiments the target sequence region is TTGATGGTATAATGAAGAA (SEQ ID NO:1097).

[0130] In some embodiments the target sequence region is GGAAGATGTAAATAAGATT (SEQ ID NO:1098).

[0131] In some embodiments the target sequence region is TTGATGGTATAATGAAGA (SEQ ID NO:2040).

[0132] In some embodiments the target sequence region is GGGAATGTAAAAGTGTA (SEQ ID NO:2041).

[0133] It is to be understood that target RNA sequence regions have uracil (U) bases in place of any thymidine (T) bases.

[0134] As used herein, the term “target cell” refers to a cell which is expressing the target nucleic acid. In some embodiments the target cell may be in vivo or in vitro. In some embodiments the target cell is a mammalian cell such as a rodent cell, such as a mouse cell or a rat cell, or a primate cell such as a monkey cell (e.g. a cynomolgus monkey cell) or a human cell.

[0135] In preferred embodiments the target cell expresses human ATXN3 mRNA, such as the ATXN3 pre-mRNA, e.g. SEQ ID NO:1, or ATXN3 mature mRNA. In some embodiments the target cell expresses monkey ATXN3 mRNA, such as the ATXN3 pre-mRNA, e.g. SEQ ID NO:2, or ATXN3 mature mRNA. In some embodiments the target cell expresses mouse ATXN3 mRNA, such as the ATXN3 pre-mRNA, e.g. SEQ ID NO:3, or ATXN3 mature mRNA. The poly A tail of ATXN3 mRNA is typically disregarded for antisense oligonucleotide targeting.

[0136] As used herein, the term “naturally occurring variant” refers to variants of ATXN3 gene or transcripts which originate from the same genetic loci as the target nucleic acid, but may differ for example, by virtue of degeneracy of the genetic code causing a multiplicity of codons encoding the same amino acid, or due to alternative splicing of pre-mRNA, or the presence of polymorphisms, such as single nucleotide polymorphisms (SNPs), and allelic variants. Based on the presence of the sufficient complementary sequence to the oligonucleotide, the oligonucleotide of the invention may therefore target the target nucleic acid and naturally occurring variants thereof.

[0137] The Homo sapiens ATXN3 gene is located at chromosome 14, 92058552 . . . 92106621, complement (NC_000014.9, Gene ID 4287).

[0138] In some embodiments, the naturally occurring variants have at least 95% such as at least 98% or at least 99% homology to a mammalian ATXN3 target nucleic acid, such as a target nucleic acid selected form the group consisting of SEQ ID NOs:1, 2 and 3. In some embodiments the naturally occurring variants have at least 99% homology to the human ATXN3 target nucleic acid of SEQ ID NO:1.

[0139] As used herein, the term “modulation of expression” refers to an overall term for an oligonucleotide's ability to alter the amount of ATXN3 protein or ATXN3 mRNA when compared to the amount of ATXN3 or ATXN3 mRNA prior to administration of the oligonucleotide. Alternatively modulation of expression may be determined by reference to a control experiment. It is generally understood that the control is an individual or target cell treated with a saline composition or an individual or target cell treated with a non-targeting oligonucleotide (mock).

[0140] One type of modulation is an oligonucleotide's ability to inhibit, down-regulate, reduce, suppress, remove, stop, block, prevent, lessen, lower, avoid or terminate expression of ATXN3, e.g. by degradation of ATXN3 mRNA.

[0141] As used herein, a “high affinity modified nucleoside” refers to a modified nucleoside which, when incorporated into the oligonucleotide enhances the affinity of the oligonucleotide for its complementary target, for example as measured by the melting temperature (T^{m}). A high affinity modified nucleoside of the present invention preferably result in an increase in melting temperature between +0.5 to +12° C., more preferably between +1.5 to +10° C. and most preferably between +3 to +8° C. per modified nucleoside. Numerous high affinity modified nucleosides are known in the art and include for example, many 2′ substituted nucleosides as well as locked nucleic acids (LNA) (see e.g. Freier & Altmann; Nucl. Acid Res., 1997, 25, 4429-4443 and Uhlmann; Curr. Opinion in Drug Development, 2000, 3(2), 293-213).

[0142] As used herein, the term “RNase H activity” refers to the ability of an antisense oligonucleotide to recruit RNase H when in a duplex with a complementary RNA molecule. WO 01/23613 provides in vitro methods for determining RNaseH activity, which may be used to determine the ability to recruit RNaseH. Typically an oligonucleotide is deemed capable of recruiting RNase H if it, when provided with a complementary target nucleic acid sequence, has an initial rate, as measured in pmol/l/min, of at least 5%, such as at least 10% or more than 20% of the of the initial rate determined when using a oligonucleotide having the same base sequence as the modified oligonucleotide being tested, but containing only DNA monomers with phosphorothioate linkages between all monomers in the oligonucleotide, and using the methodology provided by Example 91-95 of WO01/23613 (hereby incorporated by reference). For use in determining RHase H activity, recombinant human RNase H1 is available from Lubio Science GmbH, Lucerne, Switzerland.

[0143] The antisense oligonucleotide of the invention, or contiguous nucleotide sequence thereof may be a gapmer. The antisense gapmers are commonly used to inhibit a target nucleic acid via RNase H mediated degradation.

[0144] As used herein, the term “gapmer oligonucleotide” refers to an oligonucleotide that comprises at least three distinct structural regions—a 5′-flank, a gap and a 3′-flank (F-G-F′)—in the ′5→3′ orientation. The “gap” region (G) comprises a stretch of contiguous DNA nucleotides which enable the oligonucleotide to recruit RNase H. The gap region is flanked by a 5′ flanking region (F) comprising one or more sugar modified nucleosides, advantageously high affinity sugar modified nucleosides, and by a 3′ flanking region (F′) comprising one or more sugar modified nucleosides, advantageously high affinity sugar modified nucleosides. The one or more sugar modified nucleosides in region F and F′ enhance the affinity of the oligonucleotide for the target nucleic acid (i.e. are affinity enhancing sugar modified nucleosides). In some embodiments, the one or more sugar modified nucleosides in region F and F′ are 2′ sugar modified nucleosides, such as high affinity 2′ sugar modifications, such as independently selected from LNA and 2′-MOE.

[0145] In a gapmer design, the 5′ and 3′ most nucleosides of the gap region are DNA nucleosides, and are positioned adjacent to a sugar modified nucleoside of the 5′ (F) or 3′ (F′) region respectively. The flanks may further defined by having at least one sugar modified nucleoside at the end most distant from the gap region, i.e. at the 5′ end of the 5′ flank and at the 3′ end of the 3′ flank.

[0146] Regions F-G-F′ form a contiguous nucleotide sequence. Antisense oligonucleotides of the invention, or the contiguous nucleotide sequence thereof, may comprise a gapmer region of formula F-G-F′.

[0147] The overall length of the gapmer design F-G-F′ may be, for example 12 to 32 nucleosides, such as 13 to 24, such as 14 to 22 nucleosides, Such as from 14 to 17, such as 16 to 18 nucleosides.

[0148] By way of example, the gapmer oligonucleotide of the present invention can be represented by the following formulae:

F₁₋₈-G₅₋₁₆-F′₁₋₈, such as

F₁₋₈-G₇₋₁₆-F′₂₋₈

with the proviso that the overall length of the gapmer regions F-G-F′ is at least 12, such as at least 14 nucleotides in length.
Regions F, G and F′ are further defined below and can be incorporated into the F-G-F′ formula.

[0149] As used herein, “region G (gap region)” of the gapmer refers to a region of nucleosides which enables the oligonucleotide to recruit RNaseH, such as human RNase H1, typically DNA nucleosides. RNaseH is a cellular enzyme which recognizes the duplex between DNA and RNA, and enzymatically cleaves the RNA molecule. Suitably gapmers may have a gap region (G) of at least 5 or 6 contiguous DNA nucleosides, such as 5-16 contiguous DNA nucleosides, such as 6-15 contiguous DNA nucleosides, such as 7-14 contiguous DNA nucleosides, such as 8-12 contiguous DNA nucleotides, such as 8-12 contiguous DNA nucleotides in length. The gap region G may, in some embodiments consist of 6, 7, 8, 9, 10, 11, 12, 13, 14, 15 or 16 contiguous DNA nucleosides. One or more cytosine (C) DNA in the gap region may in some instances be methylated (e.g. when a DNA c is followed by a DNA g) such residues are either annotated as 5-methyl-cytosine (^{me}C. In some embodiments the gap region G may consist of 6, 7, 8, 9, 10, 11, 12, 13, 14, 15 or 16 contiguous phosphorothioate linked DNA nucleosides. In some embodiments, all internucleoside linkages in the gap are phosphorothioate linkages. Whilst traditional gapmers have a DNA gap region, there are numerous examples of modified nucleosides which allow for RNaseH recruitment when they are used within the gap region. Modified nucleosides which have been reported as being capable of recruiting RNaseH when included within a gap region include, for example, alpha-L-LNA, C4′ alkylated DNA (as described in PCT/EP2009/050349 and Vester et al., Bioorg. Med. Chem. Lett. 18 (2008) 2296-2300, both incorporated herein by reference), arabinose derived nucleosides like ANA and 2′F-ANA (Mangos et al. 2003 J. AM. CHEM. SOC. 125, 654-661), UNA (unlocked nucleic acid) (as described in Fluiter et al., Mol. Biosyst., 2009, 10, 1039 incorporated herein by reference). UNA is unlocked nucleic acid, typically where the bond between C2 and C3 of the ribose has been removed, forming an unlocked “sugar” residue. The modified nucleosides used in such gapmers may be nucleosides which adopt a 2′ endo (DNA like) structure when introduced into the gap region, i.e. modifications which allow for RNaseH recruitment). In some embodiments the DNA Gap region (G) described herein may optionally contain 1 to 3 sugar modified nucleosides which adopt a 2′ endo (DNA like) structure when introduced into the gap region.

[0150] Alternatively, there are numerous reports of the insertion of a modified nucleoside which confers a 3′ endo conformation into the gap region of gapmers, whilst retaining some RNaseH activity. Such gapmers with a gap region comprising one or more 3′endo modified nucleosides are referred to as “gap-breaker” or “gap-disrupted” gapmers, see for example WO2013/022984.

[0151] As used herein, the term “gap-breaker” or “gap-disrupted” refers to oligonucleotides that retain sufficient region of DNA nucleosides within the gap region to allow for RNaseH recruitment. The ability of “gap-breaker” oligonucleotide design to recruit RNaseH is typically sequence or even compound specific—see Rukov et al. 2015 Nucl. Acids Res. Vol. 43 pp. 8476-8487, which discloses “gap-breaker” oligonucleotides which recruit RNaseH which in some instances provide a more specific cleavage of the target RNA. Modified nucleosides used within the gap region of gap-breaker oligonucleotides may for example be modified nucleosides which confer a 3′endo conformation, such 2′-O-methyl (OMe) or 2′-O-MOE (MOE) nucleosides, or beta-D LNA nucleosides (the bridge between C2′ and C4′ of the ribose sugar ring of a nucleoside is in the beta conformation), such as beta-D-oxy LNA or ScET nucleosides.

[0152] As with gapmers containing region G described above, the gap region of “gap-breaker” or “gap-disrupted” gapmers, have a DNA nucleosides at the 5′ end of the gap (adjacent to the 3′ nucleoside of region F), and a DNA nucleoside at the 3′ end of the gap (adjacent to the 5′ nucleoside of region F′). Gapmers which comprise a disrupted gap typically retain a region of at least 3 or 4 contiguous DNA nucleosides at either the 5′ end or 3′ end of the gap region.

[0153] Exemplary designs for gap-breaker oligonucleotides include:

F₁₋₈-[D₃₋₄-E₁-D₃₋₄]-F′₁₋₈

F₁₋₈-[D₁₋₄-E₁-D₃₋₄]-F′₁₋₈

F₁₋₈-[D₃₋₄-E₁-D₁₋₄]-F′₁₋₈

wherein region G is within the brackets [Dₙ-Eᵣ-Dₘ], D is a contiguous sequence of DNA nucleosides, E is a modified nucleoside (the gap-breaker or gap-disrupting nucleoside), and F and F′ are the flanking regions as defined herein, and with the proviso that the overall length of the gapmer regions F-G-F′ is at least 12, such as at least 14 nucleotides in length.

[0154] In some embodiments, region G of a gap disrupted gapmer comprises at least 6 DNA nucleosides, such as 6, 7, 8, 9, 10, 11, 12, 13, 14, 15 or 16 DNA nucleosides. As described above, the DNA nucleosides may be contiguous or may optionally be interspersed with one or more modified nucleosides, with the proviso that the gap region G is capable of mediating RNaseH recruitment.

[0155] As used herein, “region F (flanking region)” of the gapmer refers to a region of nucleosides that is positioned immediately adjacent to the 5′ DNA nucleoside of region G. The 3′ most nucleoside of region F is a sugar modified nucleoside, such as a high affinity sugar modified nucleoside, for example a 2′ substituted nucleoside, such as a MOE nucleoside, or an LNA nucleoside.

[0156] As used herein, “region F′ (flanking region)” of the gapmer refers to a region of nucleosides that is positioned immediately adjacent to the 3′ DNA nucleoside of region G. The 5′ most nucleoside of region F′ is a sugar modified nucleoside, such as a high affinity sugar modified nucleoside, for example a 2′ substituted nucleoside, such as a MOE nucleoside, or an LNA nucleoside.

[0157] Region F is 1-8 contiguous nucleotides in length, such as 2-6, such as 3-4 contiguous nucleotides in length. Advantageously the 5′ most nucleoside of region F is a sugar modified nucleoside. In some embodiments the two 5′ most nucleoside of region F are sugar modified nucleoside. In some embodiments the 5′ most nucleoside of region F is an LNA nucleoside. In some embodiments the two 5′ most nucleoside of region F are LNA nucleosides. In some embodiments the two 5′ most nucleoside of region F are 2′ substituted nucleoside nucleosides, such as two 3′ MOE nucleosides. In some embodiments the 5′ most nucleoside of region F is a 2′ substituted nucleoside, such as a MOE nucleoside.

[0158] Region F′ is 2-8 contiguous nucleotides in length, such as 3-6, such as 4-5 contiguous nucleotides in length. Advantageously, embodiments the 3′ most nucleoside of region F′ is a sugar modified nucleoside. In some embodiments the two 3′ most nucleoside of region F′ are sugar modified nucleoside. In some embodiments the two 3′ most nucleoside of region F′ are LNA nucleosides. In some embodiments the 3′ most nucleoside of region F′ is an LNA nucleoside. In some embodiments the two 3′ most nucleoside of region F′ are 2′ substituted nucleoside nucleosides, such as two 3′ MOE nucleosides. In some embodiments the 3′ most nucleoside of region F′ is a 2′ substituted nucleoside, such as a MOE nucleoside.

[0159] It should be noted that when the length of region F or F′ is one, it is advantageously an LNA nucleoside.

[0160] In some embodiments, region F and F′ independently consists of or comprises a contiguous sequence of sugar modified nucleosides. In some embodiments, the sugar modified nucleosides of region F may be independently selected from 2′-O-alkyl-RNA units, 2′-O-methyl-RNA, 2′-amino-DNA units, 2′-fluoro-DNA units, 2′-alkoxy-RNA, MOE units, LNA units, arabino nucleic acid (ANA) units and 2′-fluoro-ANA units.

[0161] In some embodiments, region F and F′ independently comprises both LNA and a 2′ substituted modified nucleosides (mixed wing design).

[0162] In some embodiments, region F and F′ consists of only one type of sugar modified nucleosides, such as only MOE or only beta-D-oxy LNA or only ScET. Such designs are also termed uniform flanks or uniform gapmer design.

[0163] In some embodiments, all the nucleosides of region F or F′, or F and F′ are LNA nucleosides, such as independently selected from beta-D-oxy LNA, ENA or ScET nucleosides. In some embodiments, all the nucleosides of region F or F′, or F and F′ are 2′ substituted nucleosides, such as OMe or MOE nucleosides. In some embodiments region F consists of 1, 2, 3, 4, 5, 6, 7, or 8 contiguous OMe or MOE nucleosides. In some embodiments only one of the flanking regions can consist of 2′ substituted nucleosides, such as OMe or MOE nucleosides. In some embodiments it is the 5′ (F) flanking region that consists 2′ substituted nucleosides, such as OMe or MOE nucleosides whereas the 3′ (F′) flanking region comprises at least one LNA nucleoside, such as beta-D-oxy LNA nucleosides or cET nucleosides. In some embodiments it is the 3′ (F′) flanking region that consists 2′ substituted nucleosides, such as OMe or MOE nucleosides whereas the 5′ (F) flanking region comprises at least one LNA nucleoside, such as beta-D-oxy LNA nucleosides or cET nucleosides.

[0164] In some embodiments, all the modified nucleosides of region F and F′ are LNA nucleosides, such as independently selected from beta-D-oxy LNA, ENA or ScET nucleosides, wherein region F or F′, or F and F′ may optionally comprise DNA nucleosides (an alternating flank, see definition of these for more details). In some embodiments, all the modified nucleosides of region F and F′ are beta-D-oxy LNA nucleosides, wherein region F or F′, or F and F′ may optionally comprise DNA nucleosides (an alternating flank, see definition of these for more details).

[0165] In some embodiments the 5′ most and the 3′ most nucleosides of region F and F′ are LNA nucleosides, such as beta-D-oxy LNA nucleosides or ScET nucleosides.

[0166] In some embodiments, the internucleoside linkage between region F and region G is a phosphorothioate internucleoside linkage. In some embodiments, the internucleoside linkage between region F′ and region G is a phosphorothioate internucleoside linkage. In some embodiments, the internucleoside linkages between the nucleosides of region F or F′, F and F′ are phosphorothioate internucleoside linkages.

[0167] As used herein, the term “LNA gapmer” refers to a gapmer wherein either one or both of region F and F′ comprises or consists of LNA nucleosides. A beta-D-oxy gapmer is a gapmer wherein either one or both of region F and F′ comprises or consists of beta-D-oxy LNA nucleosides.

[0168] In some embodiments the LNA gapmer is of formula: [LNA]₁₋₅-[region G]-[LNA]₁₋₅, wherein region G is as defined in the Gapmer region G definition.

[0169] As used herein, the term “MOE gapmer” refers to a gapmer wherein regions F and F′ consist of MOE nucleosides. In some embodiments the MOE gapmer is of design [MOE]₁₋₈-[Region G]-[MOE]₁₋₈, such as [MOE]₂₋₇-[Region G]₅₋₁₆-[MOE]₂₋₇, such as [MOE]₃₋₆-[Region G]-[MOE]₃₋₆, wherein region G is as defined in the Gapmer definition. MOE gapmers with a 5-10-5 design (MOE-DNA-MOE) have been widely used in the art.

[0170] As used herein, the term “mixed wing gapmer” refers to an LNA gapmer wherein one or both of region F and F′ comprise a 2′ substituted nucleoside, such as a 2′ substituted nucleoside independently selected from the group consisting of 2′-O-alkyl-RNA units, 2′-O-methyl-RNA, 2′-amino-DNA units, 2′-fluoro-DNA units, 2′-alkoxy-RNA, MOE units, arabino nucleic acid (ANA) units and 2′-fluoro-ANA units, such as a MOE nucleosides. In some embodiments wherein at least one of region F and F′, or both region F and F′ comprise at least one LNA nucleoside, the remaining nucleosides of region F and F′ are independently selected from the group consisting of MOE and LNA. In some embodiments wherein at least one of region F and F′, or both region F and F′ comprise at least two LNA nucleosides, the remaining nucleosides of region F and F′ are independently selected from the group consisting of MOE and LNA. In some mixed wing embodiments, one or both of region F and F′ may further comprise one or more DNA nucleosides.

[0171] Mixed wing gapmer designs are disclosed in WO2008/049085 and WO2012/109395, both of which are hereby incorporated by reference.

[0172] As used herein, the term “Alternating Flank Gapmer” refers to LNA gapmer oligonucleotides where at least one of the flanks (F or F′) comprises DNA in addition to the LNA nucleoside(s). In some embodiments at least one of region F or F′, or both region F and F′, comprise both LNA nucleosides and DNA nucleosides. In such embodiments, the flanking region F or F′, or both F and F′ comprise at least three nucleosides, wherein the 5′ and 3′ most nucleosides of the F and/or F′ region are LNA nucleosides.

[0173] In some embodiments at least one of region F or F′, or both region F and F′, comprise both LNA nucleosides and DNA nucleosides. In such embodiments, the flanking region F or F′, or both F and F′ comprise at least three nucleosides, wherein the 5′ and 3′ most nucleosides of the F or F′ region are LNA nucleosides, and there is at least one DNA nucleoside positioned between the 5′ and 3′ most LNA nucleosides of region F or F′ (or both region F and F′).

[0174] The oligonucleotide of the invention may in some embodiments comprise or consist of the contiguous nucleotide sequence of the oligonucleotide which is complementary to the target nucleic acid, such as the gapmer F-G-F′, and further 5′ and/or 3′ nucleosides. The further 5′ and/or 3′ nucleosides may or may not be fully complementary to the target nucleic acid. Such further 5′ and/or 3′ nucleosides may be referred to as “region D′” and “region D″” herein.

[0175] The addition of “region D′” or “region D″” may be used for the purpose of joining the contiguous nucleotide sequence, such as the gapmer, to a conjugate moiety or another functional group. When used for joining the contiguous nucleotide sequence with a conjugate moiety is can serve as a biocleavable linker. Alternatively it may be used to provide exonuclease protection or for ease of synthesis or manufacture.

[0176] “Region D′” and “Region D″” can be attached to the 5′ end of region F or the 3′ end of region F′, respectively to generate designs of the following formulas D′-F-G-F′, F-G-F′-D″ or D′-F-G-F′-D″. In this instance the F-G-F′ is the gapmer portion of the oligonucleotide and region D′ or D″ constitute a separate part of the oligonucleotide.

[0177] “Region D′” or “Region D″” may independently comprise or consist of 1, 2, 3, 4 or 5 additional nucleotides, which may be complementary or non-complementary to the target nucleic acid. The nucleotide adjacent to the F or F′ region is not a sugar-modified nucleotide, such as a DNA or RNA or base modified versions of these. The D′ or D″ region may serve as a nuclease susceptible biocleavable linker (see definition of linkers). In some embodiments the additional 5′ and/or 3′ end nucleotides are linked with phosphodiester linkages, and are DNA or RNA. Nucleotide based biocleavable linkers suitable for use as region D′ or D″ are disclosed in WO2014/076195, which include by way of example a phosphodiester linked DNA dinucleotide. The use of biocleavable linkers in poly-oligonucleotide constructs is disclosed in WO2015/113922, where they are used to link multiple antisense constructs (e.g. gapmer regions) within a single oligonucleotide.

[0178] In one embodiment the oligonucleotide of the invention comprises a region D′ and/or D″ in addition to the contiguous nucleotide sequence which constitutes the gapmer.

[0179] In some embodiments, the oligonucleotide of the present invention can be represented by the following formulae:

F-G-F′; in particular F₁₋₈-G₅₋₁₆-F′₂₋₈

D′-F-G-F′, in particular D′₁₋₃-F₁₋₈-G₅₋₁₆-F′₂₋₈

F-G-F′-D″, in particular F₁₋₈-G₅₋₁₆-F′₂₋₈-D″₁₋₃

D′-F-G-F′-D″, in particular D′₁₋₃-F₁₋₈-G₅₋₁₆-F′₂₋₈-D″₁₋₃

[0180] In some embodiments the internucleoside linkage positioned between region D′ and region F is a phosphodiester linkage. In some embodiments the internucleoside linkage positioned between region F′ and region D″ is a phosphodiester linkage.

[0181] As used herein, the term “conjugate” refers to an oligonucleotide which is covalently linked to a non-nucleotide moiety (conjugate moiety or region C or third region).

[0182] Conjugation of the oligonucleotide of the invention to one or more non-nucleotide moieties may improve the pharmacology of the oligonucleotide, e.g. by affecting the activity, cellular distribution, cellular uptake or stability of the oligonucleotide. In some embodiments the conjugate moiety modify or enhance the pharmacokinetic properties of the oligonucleotide by improving cellular distribution, bioavailability, metabolism, excretion, permeability, and/or cellular uptake of the oligonucleotide. In particular the conjugate may target the oligonucleotide to a specific organ, tissue or cell type and thereby enhance the effectiveness of the oligonucleotide in that organ, tissue or cell type. At the same time the conjugate may serve to reduce activity of the oligonucleotide in non-target cell types, tissues or organs, e.g. off target activity or activity in non-target cell types, tissues or organs.

[0183] In an embodiment, the non-nucleotide moiety (conjugate moiety) is selected from the group consisting of carbohydrates, cell surface receptor ligands, drug substances, hormones, lipophilic substances, polymers, proteins, peptides, toxins (e.g. bacterial toxins), vitamins, viral proteins (e.g. capsids) or combinations thereof.

[0184] As used herein, the term “linkage” or “linker” refers to a connection between two atoms that links one chemical group or segment of interest to another chemical group or segment of interest via one or more covalent bonds. Conjugate moieties can be attached to the oligonucleotide directly or through a linking moiety (e.g. linker or tether). Linkers serve to covalently connect a third region, e.g. a conjugate moiety (Region C), to a first region, e.g. an oligonucleotide or contiguous nucleotide sequence or gapmer region F-G-F′ (region A).

[0185] In some embodiments of the invention the conjugate or oligonucleotide conjugate of the invention may optionally, comprise a linker region (second region or region B and/or region Y) which is positioned between the oligonucleotide or contiguous nucleotide sequence complementary to the target nucleic acid (region A or first region) and the conjugate moiety (region C or third region).

[0186] As used herein, the term “Region B” refers to biocleavable linkers comprising or consisting of a physiologically labile bond that is cleavable under conditions normally encountered or analogous to those encountered within a mammalian body. Conditions under which physiologically labile linkers undergo chemical transformation (e.g., cleavage) include chemical conditions such as pH, temperature, oxidative or reductive conditions or agents, and salt concentration found in or analogous to those encountered in mammalian cells. Mammalian intracellular conditions also include the presence of enzymatic activity normally present in a mammalian cell such as from proteolytic enzymes or hydrolytic enzymes or nucleases. In one embodiment the biocleavable linker is susceptible to Si nuclease cleavage. DNA phosphodiester containing biocleavable linkers are described in more detail in WO 2014/076195 (hereby incorporated by reference)—see also region D′ or D″ herein.

[0187] As used herein, the term “Region Y” refers to linkers that are not necessarily biocleavable but primarily serve to covalently connect a conjugate moiety (region C or third region), to an oligonucleotide (region A or first region). The region Y linkers may comprise a chain structure or an oligomer of repeating units such as ethylene glycol, amino acid units or amino alkyl groups. The oligonucleotide conjugates of the present invention can be constructed of the following regional elements A-C, A-B-C, A-B-Y-C, A-Y-B-C or A-Y-C. In some embodiments the linker (region Y) is an amino alkyl, such as a C₂ to C₃₆ amino alkyl group, including, for example C₆ to Cu amino alkyl groups. In a preferred embodiment the linker (region Y) is a C₆ amino alkyl group.

### II. Oligonucleotides for Inhibiting ATXN3

[0188] The invention relates to oligonucleotides, such as antisense oligonucleotides, targeting ATXN3 expression.

[0189] The oligonucleotides of the invention targeting ATXN3 are capable of hybridizing to and inhibiting the expression of a ATXN3 target nucleic acid in a cell which is expressing the ATXN3 target nucleic acid.

[0190] The ATXN3 target nucleic acid may be a mammalian ATXN3 mRNA or premRNA, such as a human, mouse or monkey ATXN3 mRNA or premRNA. In some embodiments, the ATXN3 target nucleic acid is ATXN3 mRNA or premRNA for example a premRNA or mRNA originating from the Homo sapiens Ataxin 3 (ATXN3), RefSeqGene on chromosome 14, exemplified by NCBI Reference Sequence NM_004993.5 (SEQ ID NO:1).

[0191] The human ATXN3 pre-mRNA is encoded on Homo sapiens Chromosome 14, NC_000014.9 (92058552 . . . 92106621, complement). GENE ID=4287 (ATXN3).

[0192] The oligonucleotides of the invention are capable of inhibiting the expression of ATXN3 target nucleic acid, such as the ATXN3 mRNA, in a cell which is expressing the target nucleic acid, such as the ATXN3 mRNA (e.g. a human, monkey or mouse cell).

[0193] In some embodiments, the oligonucleotides of the invention are capable of inhibiting the expression of ATXN3 target nucleic acid in a cell which is expressing the target nucleic acid, so to reduce the level of ATXN3 target nucleic acid (e.g. the mRNA) by at least 50%, at least 60%, at least 70%, at least 80%, or at least 90% inhibition compared to the expression level of the ATXN3 target nucleic acid (e.g. the mRNA) in the cell. Suitably the cell is selected from the group consisting of a human cell, a monkey cell and a mouse cell. In some embodiments, the cell is a SK-N-AS, A431, NCI-H23 or ARPE19 cell (for more information on these cells, see Examples). Example 1 provides a suitable assay for evaluating the ability of the oligonucleotides of the invention to inhibit the expression of the target nucleic acid. Suitably the evaluation of a compounds ability to inhibit the expression of the target nucleic acid is performed in vitro, such a gymnotic in vitro assay, for example as according to Example 1.

[0194] In some embodiments, the oligonucleotides of the invention are capable of inhibiting the expression of ATXN3 target nucleic acid in a cell which is expressing the target nucleic acid, so to reduce the level of ATXN3 target nucleic acid (e.g. the mRNA) by at least 50%, at least 60%, at least 70%, at least 80%, or at least 90% inhibition compared to the expression level of the ATXN3 target nucleic acid (e.g. the mRNA) in the cell for several days, such as at least for 4 days, such as at least for 7 days, such as at least 14 days, such as for at least 28 days. Suitably the cell is selected from the group consisting of a human cell, a monkey cell and a mouse cell. In some embodiments, the cell is a neuronal cell, such as, e.g., iCell® GlutaNeuron (for more information on these cells, see Table 2). Suitably the evaluation of a compounds ability to inhibit the expression of the target nucleic acid is performed in vitro. Example 16 provides a suitable assay for evaluating the ability of the oligonucleotides of the invention to inhibit the expression of the target nucleic acid over time. In some embodiments, an oligonucleotide of the invention is, in the assay of Example 16, capable of inhibiting the expression of ATXN3 with an EC50 of no more than about 100 nM, such as no more than about 50 nM, such as no more than about 40 nm, such as no more than about 30 nM, such as no more than about 20 nM, such as no more than about 15 nM, such as no more than 14 nM, such as no more than about 13 nM, such as no more than about 12 nM, after a time period of at least about 14 days, such as at least about 21 days, such as at least about 28 days.

[0195] An aspect of the present invention relates to an antisense oligonucleotide, such as an LNA antisense oligonucleotide gapmer, which comprises a contiguous nucleotide sequence of 10 to 30 nucleotides in length with at least 90% complementarity, such as is fully complementary to SEQ ID NO:1, 2 or 3.

[0196] In some embodiments, the oligonucleotide comprises a contiguous sequence of 10-30 nucleotides, which is at least 90% complementary, such as at least 91%, such as at least 92%, such as at least 93%, such as at least 94%, such as at least 95%, such as at least 96%, such as at least 97%, such as at least 98%, or 100% complementary with a region of the target nucleic acid or a target sequence. The sequences of suitable target nucleic acids are described herein above.

[0197] In some embodiments, the oligonucleotide of the invention comprises a contiguous nucleotides sequence of 12-24, such as 13, 14, 15, 16, 17, 18, 19, 20, 21, 22, or 23, contiguous nucleotides in length, wherein the contiguous nucleotide sequence is fully complementary to a target nucleic acid having a sequence as provided in the section “Target sequence regions” above.

[0198] In some embodiments, the antisense oligonucleotide of the invention comprises a contiguous nucleotides sequence of 12-15, such as 13, or 14, 15 contiguous nucleotides in length, wherein the contiguous nucleotide sequence is fully complementary to a target nucleic acid having a sequence as provided in the section “Target sequence regions” above.

[0199] Typically, the antisense oligonucleotide of the invention or the contiguous nucleotide sequence thereof is a gapmer, such as an LNA gapmer, a mixed wing gapmer, or an alternating flank gapmer.

[0200] In some embodiments, the antisense oligonucleotide according to the invention, comprises a contiguous nucleotide sequence of at least 10 contiguous nucleotides, such as at least 12 contiguous nucleotides, such as at least 13 contiguous nucleotides, such as at least 14 contiguous nucleotides, such as at least 15 contiguous nucleotides, which is fully complementary to a target sequence comprised in a sequence selected from SEQ ID NO:1094, SEQ ID NO:1095, SEQ ID NO:1096, SEQ ID NO:2040, and SEQ ID NO:2041.

[0201] In some embodiments the contiguous nucleotide sequence of the antisense oligonucleotide according to the invention is less than 20 nucleotides in length. In some embodiments the contiguous nucleotide sequence of the antisense oligonucleotide according to the invention is 12-24 nucleotides in length. In some embodiments the contiguous nucleotide sequence of the antisense oligonucleotide according to the invention is 12-22 nucleotides in length. In some embodiments the contiguous nucleotide sequence of the antisense oligonucleotide according to the invention is 12-20 nucleotides in length. In some embodiments the contiguous nucleotide sequence of the antisense oligonucleotide according to the invention is 12-18 nucleotides in length. In some embodiments the contiguous nucleotide sequence of the antisense oligonucleotide according to the invention is 12-16 nucleotides in length.

[0202] Advantageously, in some embodiments all of the internucleoside linkages between the nucleosides of the contiguous nucleotide sequence are phosphorothioate internucleoside linkages.

[0203] In some embodiments, the contiguous nucleotide sequence is fully complementary to a target nucleic acid.

[0204] The oligonucleotide compounds represent specific designs of a motif sequence. Typically, capital letters or the HELM-designation [LR] represent beta-D-oxy LNA nucleosides, lowercase letters or [dR] represent DNA nucleosides, all LNA cytosines are 5-methyl cytosine, and 5-methyl DNA cytosines are presented by “e” or ^{m}c or [5meC], and substantially all, or all, internucleoside linkages are, unless otherwise indicated, stereoundefined phosphorothioate internucleoside linkages [sP].

[0205] Design refers to the gapmer design, F-G-F′, where each number represents the number of consecutive modified nucleosides, e.g. 2′ modified nucleosides (first number=5′ flank), followed by the number of DNA nucleosides (second number=gap region), followed by the number of modified nucleosides, e.g. 2′ modified nucleosides (third number=3′ flank), optionally preceded by or followed by further repeated regions of DNA and LNA, which are not necessarily part of the contiguous nucleotide sequence that is complementary to the target nucleic acid.

[0206] Motif sequences represent the contiguous sequence of nucleobases present in the oligonucleotide, also referred to as the Oligonucleotide Base Sequence.

[0207] Particular Oligonucleotide Base Sequences, sequence motifs and antisense oligonucleotides of the present invention are shown in Table 11 of Example 13, wherein each compound represents a separate specific embodiment according to the invention.

[0208] In some embodiments, an antisense oligonucleotide according to the invention comprises a contiguous nucleotide sequence comprising the Oligonucleotide Base Sequence of an antisense oligonucleotide selected from the group consisting of Compound 1116_3 to 2039_1, shown in Table 11.

[0209] Typically, the antisense oligonucleotides is 12-24, such as 12-18, nucleosides in length and comprises a contiguous nucleotide sequence comprising at least 12, such as at least 14, such as at least 15 contiguous nucleotides present in a sequence selected from SEQ ID NO:1605, SEQ ID NO:1809, SEQ ID NO:1810, SEQ ID NO:1812, and SEQ ID NO:1813, with one or more of the further modifications described herein.

[0210] In some embodiments, the antisense oligonucleotide is an LNA gapmer oligonucleotide comprising LNA nucleosides. In some embodiments, the LNA nucleosides are beta-D-oxy LNA nucleosides.

[0211] In some embodiments, the antisense oligonucleotide is an LNA gapmer oligonucleotide comprising a contiguous nucleotide sequence of formula 5′-F-G-F′-3′, where region F and F′ independently comprise 1-8 sugar modified nucleosides, and G is a region between 5 and 16 nucleosides which are capable of recruiting RNaseH.

[0212] In some embodiments, the sugar-modified nucleosides of region F and F′ are independently selected from the group consisting of 2′-O-alkyl-RNA, 2′-O-methyl-RNA, 2′-O-alkoxy-RNA, 2′-O-methoxyethyl-RNA, 2′-amino-DNA, 2′-fluoro-DNA, arabino nucleic acid (ANA), 2′-fluoro-ANA and LNA nucleosides. Preferably, the LNA nucleosides are beta-D-oxy LNA nucleosides, wherein each LNA cytosine is an LNA 5-methyl cytosine.

[0213] In some embodiments, region G comprises 5-16 contiguous DNA nucleosides.

[0214] In some embodiments, one or more nucleosides in region G are 2′ substituted nucleosides. These can be independently selected from, e.g., 2′-O-methyl-RNA, 2′-methoxy2′-O-alkyl-RNA, 2′-O-methyl-RNA, 2′-alkoxy-RNA, 2′-O-methoxyethyl-RNA (MOE), 2′-amino-DNA, 2′-fluoro-RNA, and 2′-F-ANA nucleosides.

[0215] In some embodiments, a uracil (U) base may be used in place of a thymine (T) base. In some embodiments, a 2′-O-methyl uracil nucleoside may be used instead of a thymine nucleoside.

[0216] In some embodiments, substantially all, or all of the internucleoside linkages between the contiguous nucleosides are phosphorothioate internucleoside linkages. In some embodiments, substantially all, or all phosphorothioate internucleoside linkages between the contiguous nucleosides are stereo-undefined phosphorothioate internucleoside linkages. In some embodiments, one or more internucleoside linkages between the contiguous nucleosides are stereodefined phosphorothioate internucleoside linkages.

[0217] In some embodiments, the antisense oligonucleotide comprises a contiguous nucleotide sequence comprising the Oligonucleotide Base Sequence and, optionally, the sugar moiety modifications, of an antisense oligonucleotide selected from the group consisting of Compound ID Nos. 1605_2, 1605_3, 1605_4, 1605_5, 1605_23, 1809_8, 1810_39, 1812_4, 1813_4, 1813_15, and 1813_16, shown in Table 12.

[0218] In one aspect, the antisense oligonucleotide is an LNA gapmer antisense oligonucleotide comprising a contiguous nucleotide sequence comprising the contiguous nucleotides present in SEQ ID NO:1605. In some embodiments, at least residues 1, 2, 17 and 18 are LNA nucleosides. In some embodiments, at least residues 1, 2, 16, 17 and 18 are LNA nucleosides. Preferably, the LNA nucleosides are beta-D-oxy LNA nucleosides, wherein each LNA cytosine is an LNA 5-methyl cytosine. In some embodiments, substantially all, or all phosphorothioate internucleoside linkages between the contiguous nucleosides are stereo-undefined phosphorothioate internucleoside linkages.

[0219] In one aspect, the antisense oligonucleotide is an LNA gapmer antisense oligonucleotide comprising a contiguous nucleotide sequence comprising the contiguous nucleotides present in SEQ ID NO:1809. In some embodiments, at least residues 1, 2, 17 and 18 are LNA nucleosides. Preferably, the LNA nucleosides are beta-D-oxy LNA nucleosides, wherein each LNA cytosine is an LNA 5-methyl cytosine. In some embodiments, substantially all, or all phosphorothioate internucleoside linkages between the contiguous nucleosides are stereo-undefined phosphorothioate internucleoside linkages.

[0220] In one aspect, the antisense oligonucleotide is an LNA gapmer antisense oligonucleotide comprising a contiguous nucleotide sequence comprising the contiguous nucleotides present in SEQ ID NO:1810. In some embodiments, at least residues 1, 2, 16 and 17 are LNA nucleosides. Preferably, the LNA nucleosides are beta-D-oxy LNA nucleosides, wherein each LNA cytosine is an LNA 5-methyl cytosine. In some embodiments, substantially all, or all phosphorothioate internucleoside linkages between the contiguous nucleosides are stereo-undefined phosphorothioate internucleoside linkages.

[0221] In one aspect, the antisense oligonucleotide is an LNA gapmer antisense oligonucleotide comprising a contiguous nucleotide sequence comprising the contiguous nucleotides present in SEQ ID NO:1812. In some embodiments, at least residues 1, 2, 16, 17 and 18 are LNA nucleosides. Preferably, the LNA nucleosides are beta-D-oxy LNA nucleosides, wherein each LNA cytosine is an LNA 5-methyl cytosine. In some embodiments, substantially all, or all phosphorothioate internucleoside linkages between the contiguous nucleosides are stereo-undefined phosphorothioate internucleoside linkages.

[0222] In one aspect, the antisense oligonucleotide is an LNA gapmer antisense oligonucleotide comprising a contiguous nucleotide sequence comprising the contiguous nucleotides present in SEQ ID NO:1813. In some embodiments, at least residues 1, 2, 3, 16, 17 and 18 are LNA nucleosides. Preferably, the LNA nucleosides are beta-D-oxy LNA nucleosides, wherein each LNA cytosine is an LNA 5-methyl cytosine. In some embodiments, at least one of the nucleosides in the gap region is a 2′-O-methyl nucleoside. In some embodiments, two of the nucleosides in the gap region is a 2′-O-methyl nucleoside, such as e.g., two of residues 6, 7 and 8. In some embodiments, substantially all, or all phosphorothioate internucleoside linkages between the contiguous nucleosides are stereo-undefined phosphorothioate internucleoside linkages.

[0223] Particular sequence motifs and antisense oligonucleotides of the present invention are shown in Table 12 of Example 13, wherein each compound represents a separate specific embodiment according to the invention.

[0224] In one aspect, the invention particularly provides for an antisense oligonucleotide selected from the group consisting of Compound ID Nos. 1605_2, 1605_3, 1605_4, 1605_5, 1605_23, 1809_8, 1810_39, 1812_4, 1813_4, 1813_15, and 1813_16; or a pharmaceutically acceptable salt thereof.

[0225] In one particular aspect, the invention provides for an antisense oligonucleotide comprising or consisting of the nucleotide sequence of SEQ ID NO: 1605, wherein residues 1, 2, 4, 6, 16, 17 and 18 are beta-D-oxy-LNA nucleosides, wherein each LNA cytosine is an LNA 5-methyl cytosine, and wherein the internucleoside linkages between the nucleosides are phosphorothioate internucleoside linkages (Compound 1605_2); or a pharmaceutically acceptable salt thereof.

[0226] In one particular aspect, the invention provides for an antisense oligonucleotide comprising or consisting of the nucleotide sequence of SEQ ID NO: 1605, wherein residues 1, 2, 4, 16, 17 and 18 are beta-D-oxy-LNA nucleosides, wherein each LNA cytosine is an LNA 5-methyl cytosine, and wherein the internucleoside linkages between the nucleosides are phosphorothioate internucleoside linkages (Compound 1605_3); or a pharmaceutically acceptable salt thereof.

[0227] In one particular aspect, the invention provides for an antisense oligonucleotide comprising or consisting of the nucleotide sequence of SEQ ID NO: 1605, wherein residues 1, 2, 4, 14, 16, 17 and 18 are beta-D-oxy-LNA nucleosides, wherein each LNA cytosine is an LNA 5-methyl cytosine, and wherein the internucleoside linkages between the nucleosides are phosphorothioate internucleoside linkages (Compound 1605_4); or a pharmaceutically acceptable salt thereof.

[0228] In one particular aspect, the invention provides for an antisense oligonucleotide comprising or consisting of the nucleotide sequence of SEQ ID NO: 1605, wherein residues 1, 2, 3, 5, 15, 16, 17 and 18 are beta-D-oxy-LNA nucleosides, wherein each LNA cytosine is an LNA 5-methyl cytosine, and wherein the internucleoside linkages between the nucleosides are phosphorothioate internucleoside linkages (Compound 1605_5); or a pharmaceutically acceptable salt thereof.

[0229] In one particular aspect, the invention provides for an antisense oligonucleotide comprising or consisting of the nucleotide sequence of SEQ ID NO: 1605, wherein residues 1, 2, 5, 14, 15, 17 and 18 are beta-D-oxy-LNA nucleosides, wherein each LNA cytosine is an LNA 5-methyl cytosine, and wherein the internucleoside linkages between the nucleosides are phosphorothioate internucleoside linkages (Compound 1605_23); or a pharmaceutically acceptable salt thereof.

[0230] In one particular aspect, the invention provides for an antisense oligonucleotide comprising or consisting of the nucleotide sequence of SEQ ID NO: 1809, wherein residues 1, 2, 5, 13, 17 and 18 are beta-D-oxy-LNA nucleosides, wherein each LNA cytosine is an LNA 5-methyl cytosine, and wherein the internucleoside linkages between the nucleosides are phosphorothioate internucleoside linkages (Compound 1809_8); or a pharmaceutically acceptable salt thereof.

[0231] In one particular aspect, the invention provides for an antisense oligonucleotide comprising or consisting of the nucleotide sequence of SEQ ID NO: 1810, wherein residues 1, 2, 4, 6, 14, 16 and 17 are beta-D-oxy-LNA nucleosides, wherein each LNA cytosine is an LNA 5-methyl cytosine, and wherein the internucleoside linkages between the nucleosides are phosphorothioate internucleoside linkages (Compound 1810_39); or a pharmaceutically acceptable salt thereof.

[0232] In one particular aspect, the invention provides for an antisense oligonucleotide comprising or consisting of the nucleotide sequence of SEQ ID NO: 1812, wherein residues 1, 2, 8, 16, 17 and 18 are beta-D-oxy-LNA nucleosides, wherein each LNA cytosine is an LNA 5-methyl cytosine, and wherein the internucleoside linkages between the nucleosides are phosphorothioate internucleoside linkages (Compound 1812_4); or a pharmaceutically acceptable salt thereof.

[0233] In one particular aspect, the invention provides for an antisense oligonucleotide comprising or consisting of the nucleotide sequence of SEQ ID NO: 1813, wherein residues 1, 2, 3, 7, 16, 17 and 18 are beta-D-oxy-LNA nucleosides, wherein each LNA cytosine is an LNA 5-methyl cytosine, and wherein the internucleoside linkages between the nucleosides are phosphorothioate internucleoside linkages (Compound 1813_4); or a pharmaceutically acceptable salt thereof.

[0234] In one particular aspect, the invention provides for an antisense oligonucleotide comprising or consisting of the nucleotide sequence of SEQ ID NO: 1813, wherein residues 1, 2, 3, 16, 17 and 18 are beta-D-oxy-LNA nucleosides, wherein each LNA cytosine is an LNA 5-methyl cytosine, wherein residues 6 and 7 are 2′-O-methyl nucleosides, and wherein the internucleoside linkages between the nucleosides are phosphorothioate internucleoside linkages (Compound 1813_15); or a pharmaceutically acceptable salt thereof.

[0235] In one particular aspect, the invention provides for an antisense oligonucleotide comprising or consisting of the nucleotide sequence of SEQ ID NO: 1813, wherein residues 1, 2, 3, 16, 17 and 18 are beta-D-oxy-LNA nucleosides, wherein each LNA cytosine is an LNA 5-methyl cytosine, wherein residues 6 and 8 are 2′-O-methyl nucleosides, and wherein the internucleoside linkages between the nucleosides are phosphorothioate internucleoside linkages (Compound 1813_16); or a pharmaceutically acceptable salt thereof.

[0236] In some embodiments, the antisense oligonucleotide comprises or consists of Compound ID No. 1605_2, as shown in Table 11.

[0237] In some embodiments, the antisense oligonucleotide comprises or consists of Compound ID No. 1605_3, as shown in Table 11.

[0238] In some embodiments, the antisense oligonucleotide comprises or consists of Compound ID No. 1605_4, as shown in Table 11.

[0239] In some embodiments, the antisense oligonucleotide comprises or consists of Compound ID No. 1605_5, as shown in Table 11.

[0240] In some embodiments, the antisense oligonucleotide comprises or consists of Compound ID No. 1605_23, as shown in Table 11.

[0241] In some embodiments, the antisense oligonucleotide comprises or consists of Compound ID No. 1809_8, as shown in Table 11.

[0242] In some embodiments, the antisense oligonucleotide comprises or consists of Compound ID No. 1810_39, as shown in Table 11.

[0243] In some embodiments, the antisense oligonucleotide comprises or consists of Compound ID No. 1812_4, as shown in Table 11.

[0244] In some embodiments, the antisense oligonucleotide comprises or consists of Compound ID No. 1813_4, as shown in Table 11.

[0245] In some embodiments, the antisense oligonucleotide comprises or consists of Compound ID No. 1813_15, as shown in Table 11.

[0246] In some embodiments, the antisense oligonucleotide comprises or consists of Compound ID No. 1813_16, as shown in Table 11.

[0247] In some embodiments, the antisense oligonucleotide is an antisense oligonucleotide according to the following chemical annotation:
[0248] a) ^{[LR]}T_{[sP]}. ^{[LR][5me]}C_{[sP]}. ^{[dR]}T_{[sP]}. ^{[LR]}T_{[sP]}. ^{[dR]}C_{[sP]}. ^{[LR]}A_{[sP]}. ^{[dR]}T_{[sP]}. ^{[dR]}T_{[sP]}. ^{[dR]}A_{[sP]}. ^{[d R]T}_{[sP]}. ^{[dR]}A_{[sP]}. ^{[dR]}C_{[sP]}. ^{[dR]}C_{[sP]}. ^{[dR]}A_{[sP]}. ^{[dR]}T_{[sP]}. ^{[LR][5me]}C_{[sP]}. ^{[LR]}A_{[sP]}. ^{[LR]}A (SEQ ID NO:1605) (Compound ID No. 1605_2);
[0249] b) ^{[LR]}T_{[sP]}. ^{[LR][5me]}C_{[sP]}. ^{[dR]}T_{[sP]}. ^{[LR]}T_{[sP]}. ^{[dR]}C_{[sP]}. ^{[dR]}A_{[sP]}. ^{[dR]}T_{[sP]}. ^{[dR]}T_{[sP]}. ^{[dR]}A_{[sP]}. ^{[dR]}T_{[sP]}. ^{[dR]}A_{[sP]}. ^{[dR]}C_{[sP]}. ^{[dR]}C_{[sP]}. ^{[dR]}A_{[sP]}. ^{[dR]}T_{[sP]}. ^{[LR][5me]}C_{[sP]}. ^{[LR]}A_{[sP]}. ^{[LR]}A (SEQ ID NO:1605) (Compound ID No. 1605_3);
[0250] c) ^{[LR]}T_{[sP]}. ^{[LR][5me]}C_{[sP]}. ^{[dR]}T_{[sP]}. ^{[dR]}T_{[sP]}. ^{[dR]}C_{[sP]}. ^{[dR]}A_{[sP]}. ^{[dR]}T_{[sP]}. ^{[dR]}T_{[sP]}. ^{[dR]}A_{[sP]}. ^{[dR]}T_{[sP]}. ^{[dR]}A_{[sP]}. ^{[dR]}C_{[sP]}. ^{[dR]}C_{[sP]}. ^{[LR]}A_{[sP]}. ^{[dR]}T_{[sP]}. ^{[LR][5me]}C_{[sP]}. ^{[LR]}A_{[sP]}. ^{[LR]}A (SEQ ID NO:1605) (Compound ID No. 1605_4);
[0251] d) ^{[LR]}T_{[sP]}. ^{[LR][5me]}C_{[sP]}. ^{[LR]}T_{[sP]}. ^{[dR]}T_{[sP]}. ^{[LR][5me]}C_{[sP]}. ^{[dR]}A_{[sP]}. ^{[dR]}T_{[sP]}. ^{[dR]}T_{[sP]}. ^{[dR]}A_{[s P]}. ^{[dR]}T_{[sP]}. ^{[dR]}A_{[sP]}. ^{[dR]}C_{[sP]}. ^{[dR]}C_{[sP]}. ^{[dR]}A_{[sP]}. ^{[LR]}T_{[sP]}. ^{[LR][5me]}C_{[sP]}. ^{[LR]}A_{[sP]}. ^{[LR]}A (SEQ ID NO:1605) (Compound ID No. 1605_5);
[0252] e) ^{[LR]}T_{[sP]}. ^{[LR]}T_{[sP]}. ^{[dR]}T_{[sP]}. ^{[dR]}T_{[sP]}. ^{[LR][5me]}C_{[sP]}. ^{[dR]}A_{[sP]}. ^{[dR]}T_{[sP]}. ^{[dR]}T_{[sP]}. ^{[dR]}A_{[s P]}. ^{[dR]}T_{[sP]}. ^{[dR]}A_{[sP]}. ^{[dR]}C_{[sP]}. ^{[dR]}C_{[sP]}. ^{[LR]}T_{[sP]}. ^{[LR]}C_{[sP]}. ^{[LR]}A_{[sP]}. ^{[LR]}A (SEQ ID NO:1605) (Compound ID No. 1605_23);
[0253] f) [LR]G_{[sP]}. ^{[LR]}A_{[sP]}. ^{[dR]}C_{[sP]}. ^{[LR]}C_{[sP]}. ^{[LR]}A_{[sP]}. ^{[dR]}C_{[sP]}. ^{[dR]}T_{[sP]}. ^{[dR]}T_{[sP]}. ^{[dR]}T_{[sP]}. ^{[dR]}T_{[sP]}. ^{[dR]}A_{[sP]}. ^{[dR]}C_{[sP]}. ^{[LR]}A_{[sP]}. ^{[dR]}T_{[sP]}. ^{[dR]}T_{[sP]}. ^{[dR]}C_{[sP]}. ^{[LR][5me]}C_{[sP]}. ^{[LR][5me]}C (SEQ ID NO:1809) (Compound ID No. 1809_8);
[0254] g) ^{[LR]}T_{[sP]}. ^{[LR]}A_{[sP]}. ^{[dR]}C_{[sP]}. ^{[LR]}A_{[sP]}. ^{[dR]}C_{[sP]}. ^{[LR]}T_{[sP]}. ^{[dR]}T_{[sP]}. ^{[dR]}T_{[sP]}. ^{[dR]}T_{[sP]}. ^{[dR]}A_{[s P].} ^{[dR]}C_{[sP]}. ^{[dR]}A_{[sP]}. ^{[dR]}T_{[sP]}.[R]_{[sP]}. ^{[dR]}C_{[sP]}. ^{[LR][5me]}C_{[sP]}. ^{[LR][5me]}C (SEQ ID NO:1810) (Compound ID No. 1810_39);
[0255] h) ^{[LR]T}_{[sP]}. ^{[LR]}G_{[sP]}. ^{[dR]}T_{[sP]}. ^{[dR]}A_{[sP]}. ^{[dR]}C_{[sP]}. ^{[dR]}A_{[sP]}. ^{[dR]}C_{[sP]}. ^{[LR]}T_{[sP]}. ^{[dR]}T_{[sP]}. ^{[dR]}T_{[sP]}. ^{[dR]}T_{[sP]}. ^{[dR]}A_{[sP]}. ^{[dR]}C_{[sP]}. ^{[dR]}A_{[sP]}. ^{[dR]}T_{[sP]}. ^{[LR]}T_{[sP]}. ^{[LR][5me]}C_{[sP]}. ^{[LR][5me]}C (SEQ ID NO: 1812) (Compound ID No. 1812_4);
[0256] i) ^{[LR][5me]}C_{[sP]}. ^{[LR]}T_{[sP]}. ^{[LR]}G_{[sP]}. ^{[dR]}T_{[sP]}. ^{[dR]}A_{[sP]}. ^{[dR]}C_{[sP]}. ^{[LR]}A_{[sP]}. ^{[dR]}C_{[sP]}. ^{[dR]}T_{[sP]}. ^{[dR]}T_{[sP]}. ^{[dR]}T_{[sP]}. ^{[dR]}T_{[sP]}. ^{[dR]}A_{[sP]}. ^{[dR]}C_{[sP]}. ^{[dR]}A_{[sP]}. ^{[LR]}T_{[sP]}. ^{[LR]}T_{[sP]}. ^{[LR][5me]}C (SEQ ID NO:1813) (Compound ID No. 1813_4);
[0257] J) ^{[LR][5me]}C_{[sP]}. ^{[LR]}T_{[sP]}. ^{[LR]}G_{[sP]}. ^{[dR]}T_{[sP]}. ^{[dR]}A_{[sP]}. ^{[mR]}C_{[sP]}. ^{[mR]}A_{[sP]}. ^{[dR]}C_{[sP]}. ^{[dR]}T_{[sP]}. ^{[dR]}T_{[sP]}. ^{[dR]}T_{[sP]}. ^{[dR]}T_{[sP]}. ^{[dR]}A_{[sP]}. ^{[dR]}C_{[sP]}. ^{[dR]}A_{[sP]}. ^{[LR]}T_{[sP]}. ^{[LR]}T_{[sP]}. ^{[LR][5me]}C (SEQ ID NO:1813) (Compound ID No. 1813_15); or
[0258] k) ^{[LR][5me]}C_{[sP]}. ^{[LR]}T_{[sP]}. ^{[LR]}G[P]. ^{[dR]}T_{[sP]}. ^{[dR]}A_{[sP]}. ^{[mR]}C_{[sP]}. ^{[dR]}A_{[sP]}. ^{[mR]}C_{[sP]}. ^{[dR]}T_{[sP]}. ^{[dR]}T_{[sP]}. ^{[dR]}T_{[sP]}. ^{[dR]}T_{[sP]}. ^{[dR]}A_{[sP]}. ^{[dR]}C_{[sP]}. ^{[dR]}A_{[sP]}. ^{[LR]}T_{[sP]}. ^{[LR]}T_{[sP]}. ^{[LR][5me]}C (SEQ ID NO:1813) (Compound ID No. 1813_16);
   [0259] or is a pharmaceutically acceptable salt thereof, wherein

[0260] [LR] is a beta-D-oxy-LNA nucleoside,

[0261] [LR][5me]C is a beta-D-oxy-LNA 5-methyl cytosine nucleoside,

[0262] [dR] is a DNA nucleoside,

[0263] [sP] is a phosphorothioate internucleoside linkage (stereo undefined), and

[0264] [mR] is a 2′-O-methyl nucleoside.

[0265] In one embodiment, the antisense oligonucleotide is the antisense oligonucleotide shown in FIG. 11A (Compound ID No. 1605_2); or a pharmaceutically acceptable salt thereof.

[0266] In one embodiment, the antisense oligonucleotide is the antisense oligonucleotide shown in FIG. 11B (Compound ID No. 1605_3); or a pharmaceutically acceptable salt thereof.

[0267] In one embodiment, the antisense oligonucleotide is the antisense oligonucleotide shown in FIG. 11C (Compound ID No. 1605_4); or a pharmaceutically acceptable salt thereof.

[0268] In one embodiment, the antisense oligonucleotide is the antisense oligonucleotide shown in FIG. 11D (Compound ID No. 1605_5); or a pharmaceutically acceptable salt thereof.

[0269] In one embodiment, the antisense oligonucleotide is the antisense oligonucleotide shown in FIG. 11E (Compound ID No. 1605_23); or a pharmaceutically acceptable salt thereof.

[0270] In one embodiment, the antisense oligonucleotide is the antisense oligonucleotide shown in FIG. 11F (Compound ID No. 1809_8); or a pharmaceutically acceptable salt thereof.

[0271] In one embodiment, the antisense oligonucleotide is the antisense oligonucleotide shown in FIG. 11G (Compound ID No. 1810_39); or a pharmaceutically acceptable salt thereof.

[0272] In one embodiment, the antisense oligonucleotide is the antisense oligonucleotide shown in FIG. 11H (Compound ID No. 1812_4); or a pharmaceutically acceptable salt thereof.

[0273] In one embodiment, the antisense oligonucleotide is the antisense oligonucleotide shown in FIG. 11I (Compound ID No. 1813_4); or a pharmaceutically acceptable salt thereof.

[0274] In one embodiment, the antisense oligonucleotide is the antisense oligonucleotide shown in FIG. 11J (Compound ID No. 1813_15); or a pharmaceutically acceptable salt thereof.

[0275] In one embodiment, the antisense oligonucleotide is the antisense oligonucleotide shown in FIG. 11K (Compound ID No. 1813_16); or a pharmaceutically acceptable salt thereof.

### III. Compositions, Methods, and Applications for Inhibition of ATXN3 Expression

[0276] A. Method of Manufacture

[0277] In a further aspect, the invention provides methods for manufacturing the oligonucleotides of the invention comprising reacting nucleotide units and thereby forming covalently linked contiguous nucleotide units comprised in the oligonucleotide. Preferably, the method uses phophoramidite chemistry (see for example Caruthers et al, 1987, Methods in Enzymology vol. 154, pages 287-313). In a further embodiment the method further comprises reacting the contiguous nucleotide sequence with a conjugating moiety (ligand) to covalently attach the conjugate moiety to the oligonucleotide. In a further aspect a method is provided for manufacturing the composition of the invention, comprising mixing the oligonucleotide or conjugated oligonucleotide of the invention with a pharmaceutically acceptable diluent, solvent, carrier, salt and/or adjuvant.

[0278] B. Pharmaceutical Composition

[0279] In a further aspect, the invention provides pharmaceutical compositions comprising any of the aforementioned oligonucleotides and/or oligonucleotide conjugates or salts thereof and a pharmaceutically acceptable diluent, carrier, salt and/or adjuvant.

[0280] In a further aspect, the invention provides pharmaceutical compositions comprising any of the aforementioned oligonucleotides and/or oligonucleotide conjugates or salts thereof and a pharmaceutically acceptable diluent, carrier, salt or adjuvant.

[0281] A pharmaceutically acceptable diluent includes phosphate-buffered saline (PBS) and pharmaceutically acceptable salts include, but are not limited to, sodium and potassium salts. In some embodiments the pharmaceutically acceptable diluent is sterile phosphate buffered saline. In some embodiments the oligonucleotide is used in the pharmaceutically acceptable diluent at a concentration of 50-300 μM solution.

[0282] The compounds according to the present invention may exist in the form of their pharmaceutically acceptable salts. The term “pharmaceutically acceptable salt” refers to conventional acid-addition salts or base-addition salts that retain the biological effectiveness and properties of the compounds of the present invention and are formed from suitable non-toxic organic or inorganic acids or organic or inorganic bases. Acid-addition salts include for example those derived from inorganic acids such as hydrochloric acid, hydrobromic acid, hydroiodic acid, sulfuric acid, sulfamic acid, phosphoric acid and nitric acid, and those derived from organic acids such as p-toluenesulfonic acid, salicylic acid, methanesulfonic acid, oxalic acid, succinic acid, citric acid, malic acid, lactic acid, fumaric acid, and the like. Base-addition salts include those derived from ammonium, potassium, sodium and, quaternary ammonium hydroxides, such as for example, tetramethyl ammonium hydroxide. The chemical modification of a pharmaceutical compound into a salt is a technique well known to pharmaceutical chemists in order to obtain improved physical and chemical stability, hygroscopicity, flowability and solubility of compounds. It is for example described in Bastin, Organic Process Research & Development 2000, 4, 427-435 or in Ansel, In: Pharmaceutical Dosage Forms and Drug Delivery Systems, 6th ed. (1995), pp. 196 and 1456-1457. For example, the pharmaceutically acceptable salt of the compounds provided herein may be a sodium salt.

[0283] Suitable formulations for use in the present invention are found in Remington's Pharmaceutical Sciences, Mack Publishing Company, Philadelphia, Pa., 17th ed., 1985. For a brief review of methods for drug delivery, see, e.g., Langer (Science 249:1527-1533, 1990). WO 2007/031091 provides further suitable and preferred examples of pharmaceutically acceptable diluents, carriers and adjuvants (hereby incorporated by reference). Suitable dosages, formulations, administration routes, compositions, dosage forms, combinations with other therapeutic agents, pro-drug formulations are also provided in WO2007/031091.

[0284] Oligonucleotides or oligonucleotide conjugates of the invention may be mixed with pharmaceutically acceptable active or inert substances for the preparation of pharmaceutical compositions or formulations. Compositions and methods for the formulation of pharmaceutical compositions are dependent upon a number of criteria, including, but not limited to, route of administration, extent of disease, or dose to be administered.

[0285] These compositions may be sterilized by conventional sterilization techniques, or may be sterile filtered. The resulting aqueous solutions may be packaged for use as is, or lyophilized, the lyophilized preparation being combined with a sterile aqueous carrier prior to administration. The pH of the preparations typically will be between 3 and 11, more preferably between 5 and 9 or between 6 and 8, and most preferably between 7 and 8, such as 7 to 7.5. The resulting compositions in solid form may be packaged in multiple single dose units, each containing a fixed amount of the above-mentioned agent or agents, such as in a sealed package of tablets or capsules. The composition in solid form can also be packaged in a container for a flexible quantity, such as in a squeezable tube designed for a topically applicable cream or ointment.

[0286] In some embodiments, the oligonucleotide or oligonucleotide conjugate of the invention is a prodrug. In particular with respect to oligonucleotide conjugates the conjugate moiety is cleaved of the oligonucleotide once the prodrug is delivered to the site of action, e.g. the target cell.

[0287] C. Applications

[0288] The oligonucleotides of the invention may be utilized as research reagents for, for example, diagnostics, therapeutics and prophylaxis.

[0289] In research, such oligonucleotides may be used to specifically modulate the synthesis of ATXN3 protein in cells (e.g. in vitro cell cultures) and experimental animals thereby facilitating functional analysis of the target or an appraisal of its usefulness as a target for therapeutic intervention. Typically the target modulation is achieved by degrading or inhibiting the mRNA producing the protein, thereby prevent protein formation or by degrading or inhibiting a modulator of the gene or mRNA producing the protein.

[0290] If employing the oligonucleotide of the invention in research or diagnostics the target nucleic acid may be a cDNA or a synthetic nucleic acid derived from DNA or RNA.

[0291] The present invention provides an in vivo or in vitro method for modulating ATXN3 expression in a target cell which is expressing ATXN3, said method comprising administering an oligonucleotide of the invention in an effective amount to said cell.

In some embodiments, the target cell, is a mammalian cell in particular a human cell. The target cell may be an in vitro cell culture or an in vivo cell forming part of a tissue in a mammal.

[0292] In diagnostics the oligonucleotides may be used to detect and quantitate ATXN3 expression in cell and tissues by northern blotting, in-situ hybridisation or similar techniques.

[0293] For therapeutics, an animal or a human, suspected of having a disease or disorder, which can be treated by modulating the expression of ATXN3

[0294] The invention provides methods for treating or preventing a disease, comprising administering a therapeutically or prophylactically effective amount of an oligonucleotide, an oligonucleotide conjugate or a pharmaceutical composition of the invention to a subject suffering from or susceptible to the disease.

[0295] The invention also relates to an oligonucleotide, a composition or a conjugate as defined herein for use as a medicament.

[0296] The oligonucleotide, oligonucleotide conjugate or a pharmaceutical composition according to the invention is typically administered in an effective amount.

[0297] The invention also provides for the use of the oligonucleotide or oligonucleotide conjugate of the invention as described for the manufacture of a medicament for the treatment of a disorder as referred to herein, or for a method of the treatment of as a disorder as referred to herein.

[0298] The disease or disorder, as referred to herein, is associated with expression of ATXN3. In some embodiments disease or disorder may be associated with a mutation in the ATXN3 gene. Therefore, in some embodiments, the target nucleic acid is a mutated form of the ATXN3 sequence.

[0299] The methods of the invention are preferably employed for treatment or prophylaxis against diseases caused by abnormal levels and/or activity of ATXN3.

[0300] The invention further relates to use of an oligonucleotide, oligonucleotide conjugate or a pharmaceutical composition as defined herein for the manufacture of a medicament for the treatment of abnormal levels and/or activity of ATXN3.

[0301] In one embodiment, the invention relates to oligonucleotides, oligonucleotide conjugates or pharmaceutical compositions for use in the treatment of spinocerebellar ataxia.

[0302] D. Administration

[0303] In some embodiments, the oligonucleotides or pharmaceutical compositions of the present invention may be administered oral. In further embodiments, the oligonucleotides or pharmaceutical compositions of the present invention may be administered topical or enteral or parenteral (such as, intravenous, subcutaneous, intra-muscular, intracerebral, intracerebroventricular or intrathecal).

[0304] In a preferred embodiment the oligonucleotide or pharmaceutical compositions of the present invention are administered by a parenteral route including intravenous, intraarterial, subcutaneous, intraperitoneal or intramuscular injection or infusion, intrathecal or intracranial, e.g. intracerebral or intraventricular, intravitreal administration. In one embodiment the active oligonucleotide or oligonucleotide conjugate is administered intravenously. In another embodiment the active oligonucleotide or oligonucleotide conjugate is administered subcutaneously.

[0305] In some embodiments, the oligonucleotide, oligonucleotide conjugate or pharmaceutical composition of the invention is administered at a dose of 0.1-15 mg/kg, such as from 0.2-10 mg/kg, such as from 0.25-5 mg/kg. The administration can be once a week, every 2^{nd} week, every third week or even once a month.

[0306] E. Combination Therapies

[0307] In some embodiments the oligonucleotide, oligonucleotide conjugate or pharmaceutical composition of the invention is for use in a combination treatment with another therapeutic agent. The therapeutic agent can for example be the standard of care for the diseases or disorders described above.

### EXAMPLES

### Materials and Methods:

[0308] Oligonucleotide Synthesis:

[0309] Oligonucleotide synthesis is generally known in the art. Below is a protocol which may be applied. The oligonucleotides of the present invention may have been produced by slightly varying methods in terms of apparatus, support and concentrations used.

[0310] Oligonucleotides are synthesized on uridine universal supports using the phosphoramidite approach on an MermMade 192 oligonucleotide synthesizer at 1 μmol scale. At the end of the synthesis, the oligonucleotides are cleaved from the solid support using aqueous ammonia for 5-16 hours at 60° C. The oligonucleotides are purified by reverse phase HPLC (RP-HPLC) or by solid phase extractions and characterized by UPLC, and the molecular mass is further confirmed by ESI-MS.

[0311] Elongation of the Oligonucleotide:

[0312] The coupling of 5′DMTr protected nucleoside β-cyanoethyl-phosphoramidites, including DNA-A(Bz), DNA-G(iBu), DNA-C(Bz), DNA-T, LNA-5-methyl-C(Bz), LNA-A(Bz), LNA-G(dmf), LNA-T, 2′OMe-A(Bz), 2′OMe(U), 2′OMe(T), 2′OMe-C(Ac), 2′OMe-G(iBu), 2′OMe-G(dmf), is performed by using a solution of 0.1 M of the 5′-O-DMT-protected amidite in acetonitrile and DCI (4,5-dicyanoimidazole) in acetonitrile (0.25 M) as activator.

[0313] Purification by RP-HPLC:

[0314] The crude compounds are purified by preparative RP-HPLC on a Phenomenex Jupiter C18 10μ 150×10 mm column. 0.1 M ammonium acetate pH 8 and acetonitrile is used as buffers at a flow rate of 5 mL/min. The collected fractions are lyophilized to give the purified compound typically as a white solid.

[0315] Abbreviations:

### DCI 4,5-Dicyanoimidazole

### DCM: Dichloromethane

### DMF: Dimethylformamidine

### DMT: 4,4′-Dimethoxytrityl

### THF: Tetrahydrofurane

### Bz: Benzoyl

### Ibu: Isobutyryl

[0316] RP-HPLC: Reverse phase high performance liquid chromatography

[0317] Tₘ Assay:

[0318] Oligonucleotide and RNA target (phosphate linked, PO) duplexes are diluted to 3 mM in 500 ml RNase-free water and mixed with 500 ml 2×Tₘ-buffer (200 mM NaCl, 0.2 mM EDTA, 20 mM Naphosphate, pH 7.0). The solution is heated to 95° C. for 3 min and then allowed to anneal in room temperature for 30 min. The duplex melting temperatures (Tₘ) is measured on a Lambda 40 UV/VIS Spectrophotometer equipped with a Peltier temperature programmer PTP6 using PE Templab software (Perkin Elmer). The temperature is ramped up from 20° C. to 95° C. and then down to 25° C., recording absorption at 260 nm. First derivative and the local maximums of both the melting and annealing are used to assess the duplex Tₘ.

[0319] Cell Lines:

TABLE 2
Details in relation to the cell lines for assaying the compounds:

| | | | | | Hours of | |
|---|---|---|---|---|---|---|
| | | | | Cells/well | cell incubation | |
| Cell lines | | | | (96 well | prior to | Days of |
| Name | Vendor | Cat. no. | Cell medium | plate) | treatment | treatment |
| A431 | ECACC | 85090402 | EMEM (Cat. no. | 8000 | 24 | 3 |
| | | | M2279), 10% FBS | | | |
| | | | (Cat. no. F7524), | | | |
| | | | 2 mM Glutamine | | | |
| | | | (Cat. no. G8541), | | | |
| | | | 0.1 mM NEAA | | | |
| | | | (Cat. no. M7145), | | | |
| | | | 25 μg/ml Gentamicin | | | |
| | | | (Cat. no. G1397) | | | |
| NCI-H23 | ATCC | CRL-5800 | RPMI 1640 | 10000 | 24 | 3 |
| | | | (Cat. no. R2405), | | | |
| | | | 10% FBS (Cat. no. | | | |
| | | | F7524), 10 mM | | | |
| | | | Hepes (Cat. no. | | | |
| | | | H0887), 1 mM | | | |
| | | | Sodium Pyruvate | | | |
| | | | (Cat. no. S8636), | | | |
| | | | 25 μg/ml Gentamicin | | | |
| | | | (Cat. no. G1397) | | | |
| ARPE19 | ATCC | CRL-2302 | DMEM/F-12 HAM | 2000 | 0 | 4 |
| | | | (Cat. no. D8437), | | | |
| | | | 10% FBS (Cat. no. | | | |
| | | | F7524), 25 μg/ml | | | |
| | | | Gentamicin | | | |
| | | | (Cat. no. G1397) | | | |
| U251 | ECACC | 9063001 | EMEM (Cat. no. | 2000 | 0 | 4 |
| | | | M2279), 10% FBS | | | |
| | | | (Cat. no. F7524), | | | |
| | | | 2 mM Glutamine | | | |
| | | | (Cat. no. G8541), | | | |
| | | | 0.1 mM NEAA | | | |
| | | | (Cat. no. M7145), | | | |
| | | | 1 mM Sodium Pyruvate | | | |
| | | | (Cat. no. S8636), | | | |
| | | | 25 μg/ml Gentamicin | | | |
| | | | (Cat. no. G1397) | | | |
| U2-OS | ATCC | HTB-96 | MCCoy 5A medium | 7000 | 24 | 3 |
| | | | (Cat. no. M8403), | | | |
| | | | 10% FBS (Cat. no. | | | |
| | | | F7524), 1.5 mM | | | |
| | | | Glutamine (Cat. no. | | | |
| | | | G8541), 25 μg/ml | | | |
| | | | Gentamicin | | | |
| | | | (Cat. no. G1397) | | | |
| SK-N-AS | ATCC | CRL-2137 | Dulbecco's Modified | 9300 | 24 | 4 |
| | | | Eagle's Medium, | | | |
| | | | supplemented with | | | |
| | | | 0.1 mM Non-Essential | | | |
| | | | Amino Acids (NEAA) | | | |
| | | | and fetal bovine | | | |
| | | | serum to a final | | | |
| | | | concentration of 10% | | | |
| iCell ® | Stemcell | R1034 | BrainPhys Neuronal | 50.000-80.000 | 168 | 4 |
| GlutaNeurons | Technologies | | Medium (Cat. no. | | | |
| | | | 5790) supplemented | | | |
| | | | with iCell ® | | | |
| | | | GlutaNeurons Kit | | | |
| | | | (Stemcell Technologies. | | | |
| | | | no. R1034) according | | | |
| | | | to vendor), N-2 | | | |
| | | | (Thermo Fisher), | | | |
| | | | 1 μg/ml Laminin 512 | | | |
| | | | (BioLamina, no. LN521) | | | |

* All medium and additives are purchased from Sigma Aldrich unless otherweise stated.

### Example 1: Testing In Vitro Efficacy of LNA Oligonucleotides in SK-N-AS, A431, NCI-H23 and ARPE19 Cell Lines at 25 and 5 μM

### Materials and Methods:

[0320] An oligonucleotide screen is performed in human cell lines using the LNA oligonucleotides in Table 3 (CMP ID NO: 4_1-1089_1, see column “oligonucleotide compounds”) targeting SEQ ID NO:1. The human cell lines SK-N-AS, A341, NCI-H23 and ARPE19 are purchased from the vendors listed in Table 2, and are maintained as recommended by the supplier in a humidified incubator at 37° C. with 5% CO₂. For the screening assays, cells are seeded in 96 multi well plates in media recommended by the supplier (see Table 2 in the Materials and Methods section). The number of cells/well is optimized for each cell line (see Table 2 in the Materials and Methods section).

[0321] Cells are incubated between 0 and 24 hours before addition of the oligonucleotide in a concentration of 5 or 25 μM (dissolved in PBS). 3-4 days after addition of the oligonucleotide, the cells are harvested (The incubation times for each cell line are indicated in Table 2 in the Materials and Methods section).

[0322] RNA is extracted using the Qiagen RNeasy 96 kit (74182), according to the manufacturer's instructions). cDNA synthesis and qPCR is performed using qScript XLT one-step RT-qPCR ToughMix Low ROX, 95134-100 (Quanta Biosciences). Target transcript levels are quantified using FAM labeled TaqMan assays from Thermo Fisher Scientific in a multiplex reaction with a VIC labelled GUSB control. TaqMan primer assays for the target transcript of interest ATXN3 (see below) and a house keeping gene GUSB (4326320E VIC-MGB probe).

[0323] ATXN3 primer assay (Assay ID: N/A Item Name Hs.PT.58.39355049):

Forward primer:
(SEQ ID NO: 1128)
GTTTCTAAAGACATGGTCACAGC
Reverse:
(SEQ ID NO: 1129)
CTATCAGGACAGAGTTCACATCC
Probe:
(SEQ ID NO: 1130)
56-FAM/AAAGGCCAG/ZEN/CCACCAGTTCAGG/3IABkFQ/

### Results:

[0324] The relative ATXN3 mRNA expression levels are determined as % of control (PBS-treated cells) i.e. the lower the value the larger the inhibition.

TABLE 3
Sequence Motifs and Compounds of Exemplary Compounds of the Invention

| SEQ | | | | | CMP ID | Oligonucleotide |
|---|---|---|---|---|---|---|
| ID NO | motif sequence | start | end | design | NO | compound |
| 4 | aagaaaccaaaccc | 743 | 756 | 2-10-2 | 4_1 | AAgaaaccaaacCC |
| 5 | aaagaaaccaaacc | 744 | 757 | 2-10-2 | 5_1 | AAagaaaccaaaCC |
| 6 | aaaagaaaccaaac | 745 | 758 | 2-10-2 | 6_1 | AAaagaaaccaaAC |
| 7 | caaaagaaaccaaa | 746 | 759 | 2-10-2 | 7_1 | CAaaagaaaccaAA |
| 8 | ccaaaagaaaccaa | 747 | 760 | 2-10-2 | 8_1 | CCaaaagaaaccAA |
| 9 | tccactcctaatac | 803 | 816 | 2-10-2 | 9_1 | TCcactcctaatAC |
| 10 | gtccactcctaata | 804 | 817 | 2-10-2 | 10_1 | GTccactcctaaTA |
| 11 | agtccactcctaat | 805 | 818 | 2-10-2 | 11_1 | AGtccactcctaAT |
| 12 | cagtccactcctaa | 806 | 819 | 2-10-2 | 12_1 | CAgtccactcctAA |
| 13 | ccagtccactccta | 807 | 820 | 2-10-2 | 13_1 | CCagtccactccTA |
| 14 | actctttccaaaca | 1012 | 1025 | 2-10-2 | 14_1 | ACtctttccaaaCA |
| 15 | aactctttccaaac | 1013 | 1026 | 2-10-2 | 15_1 | AActctttccaaAC |
| 16 | caactctttccaaa | 1014 | 1027 | 2-10-2 | 16_1 | CAactctttccaAA |
| 17 | gcaactctttccaa | 1015 | 1028 | 2-10-2 | 17_1 | GCaactctttccAA |
| 18 | agcaactctttcca | 1016 | 1029 | 2-10-2 | 18_1 | AGcaactctttcCA |
| 19 | cagcaactctttcc | 1017 | 1030 | 2-10-2 | 19_1 | CAgcaactctttCC |
| 20 | ccagcaactctttc | 1018 | 1031 | 2-10-2 | 20_1 | CCagcaactcttTC |
| 21 | accagcaactcttt | 1019 | 1032 | 2-10-2 | 21_1 | ACcagcaactctTT |
| 22 | ctcctattaaataa | 1040 | 1053 | 2-10-2 | 22_1 | CTcctattaaatAA |
| 23 | cctcctattaaata | 1041 | 1054 | 2-10-2 | 23_1 | CCtcctattaaaTA |
| 24 | tcctcctattaaat | 1042 | 1055 | 2-10-2 | 24_1 | TCctcctattaaAT |
| 25 | ctcctcctattaaa | 1043 | 1056 | 2-10-2 | 25_1 | CTcctcctattaAA |
| 26 | gctcctcctattaa | 1044 | 1057 | 2-10-2 | 26_1 | GCtcctcctattAA |
| 27 | tgctcctcctatta | 1045 | 1058 | 2-10-2 | 27_1 | TGctcctcctatTA |
| 28 | ttgctcctcctatt | 1046 | 1059 | 2-10-2 | 28_1 | TTgctcctcctaTT |
| 29 | tttgctcctcctat | 1047 | 1060 | 2-10-2 | 29_1 | TTtgctcctcctAT |
| 30 | ctttgctcctccta | 1048 | 1061 | 2-10-2 | 30_1 | CTttgctcctccTA |
| 31 | cctttgctcctcct | 1049 | 1062 | 2-10-2 | 31_1 | CCtttgctcctcCT |
| 32 | ccctttgctcctcc | 1050 | 1063 | 2-10-2 | 32_1 | CCctttgctcctCC |
| 33 | accctttgctcctc | 1051 | 1064 | 2-10-2 | 33_1 | ACcctttgctccTC |
| 34 | aaccctttgctcct | 1052 | 1065 | 2-10-2 | 34_1 | AAccctttgctcCT |
| 35 | aaaccctttgctcc | 1053 | 1066 | 2-10-2 | 35_1 | AAaccctttgctCC |
| 36 | aaaaccctttgctc | 1054 | 1067 | 2-10-2 | 36_1 | AAaaccctttgcTC |
| 37 | aaaaaccctttgct | 1055 | 1068 | 2-10-2 | 37_1 | AAaaaccctttgCT |
| 38 | caaaaaccctttgc | 1056 | 1069 | 2-10-2 | 38_1 | CAaaaaccctttGC |
| 39 | acaaaaaccctttg | 1057 | 1070 | 2-10-2 | 39_1 | ACaaaaacccttTG |
| 40 | aacaaaaacccttt | 1058 | 1071 | 2-10-2 | 40_1 | AAcaaaaaccctTT |
| 41 | aaacaaaaaccctt | 1059 | 1072 | 2-10-2 | 41_1 | AAacaaaaacccTT |
| 42 | aaaacaaaaaccct | 1060 | 1073 | 2-10-2 | 42_1 | AAaacaaaaaccCT |
| 43 | taaaacaaaaaccc | 1061 | 1074 | 2-10-2 | 43_1 | TAaaacaaaaacCC |
| 44 | ataaaacaaaaacc | 1062 | 1075 | 2-10-2 | 44_1 | ATaaaacaaaaaCC |
| 45 | aataaaacaaaaac | 1063 | 1076 | 2-10-2 | 45_1 | AAtaaaacaaaaAC |
| 46 | taataaaacaaaaa | 1064 | 1077 | 2-10-2 | 46_1 | TAataaaacaaaAA |
| 47 | ttaataaaacaaaa | 1065 | 1078 | 2-10-2 | 47_1 | TTaataaaacaaAA |
| 48 | tttaataaaacaaa | 1066 | 1079 | 2-10-2 | 48_1 | TTtaataaaacaAA |
| 49 | atttaataaaacaa | 1067 | 1080 | 2-10-2 | 49_1 | ATttaataaaacAA |
| 50 | ttaaaataaaaatt | 1194 | 1207 | 2-10-2 | 50_1 | TTaaaataaaaaTT |
| 51 | tttaaaataaaaat | 1195 | 1208 | 2-10-2 | 51_1 | TTtaaaataaaaAT |
| 52 | ctttaaaataaaaa | 1196 | 1209 | 2-10-2 | 52_1 | CTttaaaataaaAA |
| 53 | tctttaaaataaaa | 1197 | 1210 | 2-10-2 | 53_1 | TCtttaaaataaAA |
| 54 | atctttaaaataaa | 1198 | 1211 | 2-10-2 | 54_1 | ATctttaaaataAA |
| 55 | catctttaaaataa | 1199 | 1212 | 2-10-2 | 55_1 | CAtctttaaaatAA |
| 56 | ccatctttaaaata | 1200 | 1213 | 2-10-2 | 56_1 | CCatctttaaaaTA |
| 57 | tctaacttaataaa | 2886 | 2899 | 2-10-2 | 57_1 | TCtaacttaataAA |
| 58 | ttctaacttaataa | 2887 | 2900 | 2-10-2 | 58_1 | TTctaacttaatAA |
| 59 | attctaacttaata | 2888 | 2901 | 2-10-2 | 59_1 | ATtctaacttaaTA |
| 60 | cattctaacttaat | 2889 | 2902 | 2-10-2 | 60_1 | CAttctaacttaAT |
| 61 | acattctaacttaa | 2890 | 2903 | 2-10-2 | 61_1 | ACattctaacttAA |
| 62 | tacattctaactta | 2891 | 2904 | 2-10-2 | 62_1 | TAcattctaactTA |
| 63 | ttacattctaactt | 2892 | 2905 | 2-10-2 | 63_1 | TTacattctaacTT |
| 64 | tttacattctaact | 2893 | 2906 | 2-10-2 | 64_1 | TTtacattctaaCT |
| 65 | ttttacattctaac | 2894 | 2907 | 2-10-2 | 65_1 | TTttacattctaAC |
| 66 | tttttacattctaa | 2895 | 2908 | 2-10-2 | 66_1 | TTtttacattctAA |
| 67 | gtttttacattcta | 2896 | 2909 | 2-10-2 | 67_1 | GTttttacattcTA |
| 68 | tgtttttacattct | 2897 | 2910 | 2-10-2 | 68_1 | TGtttttacattCT |
| 69 | ctgtttttacattc | 2898 | 2911 | 2-10-2 | 69_1 | CTgtttttacatTC |
| 70 | ttcaaatatttatt | 2969 | 2982 | 2-10-2 | 70_1 | TTcaaatatttaTT |
| 71 | attcaaatatttat | 2970 | 2983 | 2-10-2 | 71_1 | ATtcaaatatttAT |
| 72 | cattcaaatattta | 2971 | 2984 | 2-10-2 | 72_1 | CAttcaaatattTA |
| 73 | ccattcaaatattt | 2972 | 2985 | 2-10-2 | 73_1 | CCattcaaatatTT |
| 74 | cccattcaaatatt | 2973 | 2986 | 2-10-2 | 74_1 | CCcattcaaataTT |
| 75 | ccccattcaaatat | 2974 | 2987 | 2-10-2 | 75_1 | CCccattcaaatAT |
| 76 | gccccattcaaata | 2975 | 2988 | 2-10-2 | 76_1 | GCcccattcaaaTA |
| 77 | tatacatttttttc | 3173 | 3186 | 2-10-2 | 77_1 | TAtacattttttTC |
| 78 | atatacattttttt | 3174 | 3187 | 2-10-2 | 78_1 | ATatacatttttTT |
| 79 | tatatacatttttt | 3175 | 3188 | 2-10-2 | 79_1 | TAtatacattttTT |
| 80 | atatatacattttt | 3176 | 3189 | 2-10-2 | 80_1 | ATatatacatttTT |
| 81 | aatatatacatttt | 3177 | 3190 | 2-10-2 | 81_1 | AAtatatacattTT |
| 82 | aaatatatacattt | 3178 | 3191 | 2-10-2 | 82_1 | AAatatatacatTT |
| 83 | caaatatatacatt | 3179 | 3192 | 2-10-2 | 83_1 | CAaatatatacaTT |
| 84 | tcaaatatatacat | 3180 | 3193 | 2-10-2 | 84_1 | TCaaatatatacAT |
| 85 | ttcaaatatataca | 3181 | 3194 | 2-10-2 | 85_1 | TTcaaatatataCA |
| 86 | attcaaatatatac | 3182 | 3195 | 2-10-2 | 86_1 | ATtcaaatatatAC |
| 87 | cattcaaatatata | 3183 | 3196 | 2-10-2 | 87_1 | CAttcaaatataTA |
| 88 | ccattcaaatatat | 3184 | 3197 | 2-10-2 | 88_1 | CCattcaaatatAT |
| 89 | tccattcaaatata | 3185 | 3198 | 2-10-2 | 89_1 | TCcattcaaataTA |
| 90 | atccattcaaatat | 3186 | 3199 | 2-10-2 | 90_1 | ATccattcaaatAT |
| 91 | tatccattcaaata | 3187 | 3200 | 2-10-2 | 91_1 | TAtccattcaaaTA |
| 92 | ttatccattcaaat | 3188 | 3201 | 2-10-2 | 92_1 | TTatccattcaaAT |
| 93 | tttatccattcaaa | 3189 | 3202 | 2-10-2 | 93_1 | TTtatccattcaAA |
| 94 | ctttatccattcaa | 3190 | 3203 | 2-10-2 | 94_1 | CTttatccattcAA |
| 95 | tctttatccattca | 3191 | 3204 | 2-10-2 | 95_1 | TCtttatccattCA |
| 96 | ctctttatccattc | 3192 | 3205 | 2-10-2 | 96_1 | CTctttatccatTC |
| 97 | tctctttatccatt | 3193 | 3206 | 2-10-2 | 97_1 | TCtctttatccaTT |
| 98 | ccatatatatctca | 3221 | 3234 | 2-10-2 | 98_1 | CCatatatatctCA |
| 99 | accatatatatctc | 3222 | 3235 | 2-10-2 | 99_1 | ACcatatatatcTC |
| 100 | caccatatatatct | 3223 | 3236 | 2-10-2 | 100_1 | CAccatatatatCT |
| 101 | gcaccatatatatc | 3224 | 3237 | 2-10-2 | 101_1 | GCaccatatataTC |
| 102 | agcaccatatatat | 3225 | 3238 | 2-10-2 | 102_1 | AGcaccatatatAT |
| 103 | cagcaccatatata | 3226 | 3239 | 2-10-2 | 103_1 | CAgcaccatataTA |
| 104 | acagcaccatatat | 3227 | 3240 | 2-10-2 | 104_1 | ACagcaccatatAT |
| 105 | aacagcaccatata | 3228 | 3241 | 2-10-2 | 105_1 | AAcagcaccataTA |
| 106 | aaaacaaacaacaa | 3462 | 3475 | 2-10-2 | 106_1 | AAaacaaacaacAA |
| 107 | taaaacaaacaaca | 3463 | 3476 | 2-10-2 | 107_1 | TAaaacaaacaaCA |
| 108 | ctaaaacaaacaac | 3464 | 3477 | 2-10-2 | 108_1 | CTaaaacaaacaAC |
| 109 | actaaaacaaacaa | 3465 | 3478 | 2-10-2 | 109_1 | ACtaaaacaaacAA |
| 110 | aactaaaacaaaca | 3466 | 3479 | 2-10-2 | 110_1 | AActaaaacaaaCA |
| 111 | gaactaaaacaaac | 3467 | 3480 | 2-10-2 | 111_1 | GAactaaaacaaAC |
| 112 | agaactaaaacaaa | 3468 | 3481 | 2-10-2 | 112_1 | AGaactaaaacaAA |
| 113 | cagaactaaaacaa | 3469 | 3482 | 2-10-2 | 113_1 | CAgaactaaaacAA |
| 114 | ccagaactaaaaca | 3470 | 3483 | 2-10-2 | 114_1 | CCagaactaaaaCA |
| 115 | accagaactaaaac | 3471 | 3484 | 2-10-2 | 115_1 | ACcagaactaaaAC |
| 116 | atgttattatcccc | 3882 | 3895 | 2-10-2 | 116_1 | ATgttattatccCC |
| 117 | tatgttattatccc | 3883 | 3896 | 2-10-2 | 117_1 | TAtgttattatcCC |
| 118 | ctatgttattatcc | 3884 | 3897 | 2-10-2 | 118_1 | CTatgttattatCC |
| 119 | tctatgttattatc | 3885 | 3898 | 2-10-2 | 119_1 | TCtatgttattaTC |
| 120 | tacactctaactct | 3908 | 3921 | 2-10-2 | 120_1 | TAcactctaactCT |
| 121 | ctacactctaactc | 3909 | 3922 | 2-10-2 | 121_1 | CTacactctaacTC |
| 122 | tctacactctaact | 3910 | 3923 | 2-10-2 | 122_1 | TCtacactctaaCT |
| 123 | ctctacactctaac | 3911 | 3924 | 2-10-2 | 123_1 | CTctacactctaAC |
| 124 | tctctacactctaa | 3912 | 3925 | 2-10-2 | 124_1 | TCtctacactctAA |
| 125 | ttctctacactcta | 3913 | 3926 | 2-10-2 | 125_1 | TTctctacactcTA |
| 126 | cttctctacactct | 3914 | 3927 | 2-10-2 | 126_1 | CTtctctacactCT |
| 127 | ccttctctacactc | 3915 | 3928 | 2-10-2 | 127_1 | CCttctctacacTC |
| 128 | tacaacacaaatca | 4102 | 4115 | 2-10-2 | 128_1 | TAcaacacaaatCA |
| 129 | ctacaacacaaatc | 4103 | 4116 | 2-10-2 | 129_1 | CTacaacacaaaTC |
| 130 | actacaacacaaat | 4104 | 4117 | 2-10-2 | 130_1 | ACtacaacacaaAT |
| 131 | aactacaacacaaa | 4105 | 4118 | 2-10-2 | 131_1 | AActacaacacaAA |
| 132 | taactacaacacaa | 4106 | 4119 | 2-10-2 | 132_1 | TAactacaacacAA |
| 133 | ctaactacaacaca | 4107 | 4120 | 2-10-2 | 133_1 | CTaactacaacaCA |
| 134 | actaactacaacac | 4108 | 4121 | 2-10-2 | 134_1 | ACtaactacaacAC |
| 135 | tactaactacaaca | 4109 | 4122 | 2-10-2 | 135_1 | TActaactacaaCA |
| 136 | ctactaactacaac | 4110 | 4123 | 2-10-2 | 136_1 | CTactaactacaAC |
| 137 | actactaactacaa | 4111 | 4124 | 2-10-2 | 137_1 | ACtactaactacAA |
| 138 | cactactaactaca | 4112 | 4125 | 2-10-2 | 138_1 | CActactaactaCA |
| 139 | acactactaactac | 4113 | 4126 | 2-10-2 | 139_1 | ACactactaactAC |
| 140 | gacactactaacta | 4114 | 4127 | 2-10-2 | 140_1 | GAcactactaacTA |
| 141 | agacactactaact | 4115 | 4128 | 2-10-2 | 141_1 | AGacactactaaCT |
| 142 | tttacccccaacct | 4173 | 4186 | 2-10-2 | 142_1 | TTtacccccaacCT |
| 143 | atttacccccaacc | 4174 | 4187 | 2-10-2 | 143_1 | ATttacccccaaCC |
| 144 | catttacccccaac | 4175 | 4188 | 2-10-2 | 144_1 | CAtttacccccaAC |
| 145 | tcatttacccccaa | 4176 | 4189 | 2-10-2 | 145_1 | TCatttacccccAA |
| 146 | atcatttaccccca | 4177 | 4190 | 2-10-2 | 146_1 | ATcatttaccccCA |
| 147 | aatcatttaccccc | 4178 | 4191 | 2-10-2 | 147_1 | AAtcatttacccCC |
| 148 | aaatcatttacccc | 4179 | 4192 | 2-10-2 | 148_1 | AAatcatttaccCC |
| 149 | caaatcatttaccc | 4180 | 4193 | 2-10-2 | 149_1 | CAaatcatttacCC |
| 150 | ccaaatcatttacc | 4181 | 4194 | 2-10-2 | 150_1 | CCaaatcatttaCC |
| 151 | accaaatcatttac | 4182 | 4195 | 2-10-2 | 151_1 | ACcaaatcatttAC |
| 152 | taccaaatcattta | 4183 | 4196 | 2-10-2 | 152_1 | TAccaaatcattTA |
| 153 | ctaccaaatcattt | 4184 | 4197 | 2-10-2 | 153_1 | CTaccaaatcatTT |
| 154 | gctaccaaatcatt | 4185 | 4198 | 2-10-2 | 154_1 | GCtaccaaatcaTT |
| 155 | tgctaccaaatcat | 4186 | 4199 | 2-10-2 | 155_1 | TGctaccaaatcAT |
| 156 | ctgctaccaaatca | 4187 | 4200 | 2-10-2 | 156_1 | CTgctaccaaatCA |
| 157 | actgctaccaaatc | 4188 | 4201 | 2-10-2 | 157_1 | ACtgctaccaaaTC |
| 158 | aactgctaccaaat | 4189 | 4202 | 2-10-2 | 158_1 | AActgctaccaaAT |
| 159 | aagctttaatcaaa | 5102 | 5115 | 2-10-2 | 159_1 | AAgctttaatcaAA |
| 160 | caagctttaatcaa | 5103 | 5116 | 2-10-2 | 160_1 | CAagctttaatcAA |
| 161 | tcaagctttaatca | 5104 | 5117 | 2-10-2 | 161_1 | TCaagctttaatCA |
| 162 | atcaagctttaatc | 5105 | 5118 | 2-10-2 | 162_1 | ATcaagctttaaTC |
| 163 | catcaagctttaat | 5106 | 5119 | 2-10-2 | 163_1 | CAtcaagctttaAT |
| 164 | tcaaactatcccca | 5131 | 5144 | 2-10-2 | 164_1 | TCaaactatcccCA |
| 165 | ctcaaactatcccc | 5132 | 5145 | 2-10-2 | 165_1 | CTcaaactatccCC |
| 166 | tctcaaactatccc | 5133 | 5146 | 2-10-2 | 166_1 | TCtcaaactatcCC |
| 167 | atctcaaactatcc | 5134 | 5147 | 2-10-2 | 167_1 | ATctcaaactatCC |
| 168 | tatctcaaactatc | 5135 | 5148 | 2-10-2 | 168_1 | TAtctcaaactaTC |
| 169 | ttatctcaaactat | 5136 | 5149 | 2-10-2 | 169_1 | TTatctcaaactAT |
| 170 | cttatctcaaacta | 5137 | 5150 | 2-10-2 | 170_1 | CTtatctcaaacTA |
| 171 | ccttatctcaaact | 5138 | 5151 | 2-10-2 | 171_1 | CCttatctcaaaCT |
| 172 | cccttatctcaaac | 5139 | 5152 | 2-10-2 | 172_1 | CCcttatctcaaAC |
| 173 | gcccttatctcaaa | 5140 | 5153 | 2-10-2 | 173_1 | GCccttatctcaAA |
| 174 | tgcccttatctcaa | 5141 | 5154 | 2-10-2 | 174_1 | TGcccttatctcAA |
| 175 | caaacttcatcaaa | 5540 | 5553 | 2-10-2 | 175_1 | CAaacttcatcaAA |
| 176 | tcaaacttcatcaa | 5541 | 5554 | 2-10-2 | 176_1 | TCaaacttcatcAA |
| 177 | atcaaacttcatca | 5542 | 5555 | 2-10-2 | 177_1 | ATcaaacttcatCA |
| 178 | aatcaaacttcatc | 5543 | 5556 | 2-10-2 | 178_1 | AAtcaaacttcaTC |
| 179 | aaatcaaacttcat | 5544 | 5557 | 2-10-2 | 179_1 | AAatcaaacttcAT |
| 180 | gaaatcaaacttca | 5545 | 5558 | 2-10-2 | 180_1 | GAaatcaaacttCA |
| 181 | tgaaatcaaacttc | 5546 | 5559 | 2-10-2 | 181_1 | TGaaatcaaactTC |
| 182 | ttgaaatcaaactt | 5547 | 5560 | 2-10-2 | 182_1 | TTgaaatcaaacTT |
| 183 | aacacaaatttcct | 5693 | 5706 | 2-10-2 | 183_1 | AAcacaaatttcCT |
| 184 | taacacaaatttcc | 5694 | 5707 | 2-10-2 | 184_1 | TAacacaaatttCC |
| 185 | ctaacacaaatttc | 5695 | 5708 | 2-10-2 | 185_1 | CTaacacaaattTC |
| 186 | gctaacacaaattt | 5696 | 5709 | 2-10-2 | 186_1 | GCtaacacaaatTT |
| 187 | tgctaacacaaatt | 5697 | 5710 | 2-10-2 | 187_1 | TGctaacacaaaTT |
| 188 | ttgctaacacaaat | 5698 | 5711 | 2-10-2 | 188_1 | TTgctaacacaaAT |
| 189 | tttgctaacacaaa | 5699 | 5712 | 2-10-2 | 189_1 | TTtgctaacacaAA |
| 190 | ctttgctaacacaa | 5700 | 5713 | 2-10-2 | 190_1 | CTttgctaacacAA |
| 191 | cctttgctaacaca | 5701 | 5714 | 2-10-2 | 191_1 | CCtttgctaacaCA |
| 192 | taactaataattat | 6417 | 6430 | 2-10-2 | 192_1 | TAactaataattAT |
| 193 | ataactaataatta | 6418 | 6431 | 2-10-2 | 193_1 | ATaactaataatTA |
| 194 | aataactaataatt | 6419 | 6432 | 2-10-2 | 194_1 | AAtaactaataaTT |
| 195 | taataactaataat | 6420 | 6433 | 2-10-2 | 195_1 | TAataactaataAT |
| 196 | ataataactaataa | 6421 | 6434 | 2-10-2 | 196_1 | ATaataactaatAA |
| 197 | aataataactaata | 6422 | 6435 | 2-10-2 | 197_1 | AAtaataactaaTA |
| 198 | caataataactaat | 6423 | 6436 | 2-10-2 | 198_1 | CAataataactaAT |
| 199 | ccaataataactaa | 6424 | 6437 | 2-10-2 | 199_1 | CCaataataactAA |
| 200 | accaataataacta | 6425 | 6438 | 2-10-2 | 200_1 | ACcaataataacTA |
| 201 | aaccaataataact | 6426 | 6439 | 2-10-2 | 201_1 | AAccaataataaCT |
| 202 | taaccaataataac | 6427 | 6440 | 2-10-2 | 202_1 | TAaccaataataAC |
| 203 | ataaccaataataa | 6428 | 6441 | 2-10-2 | 203_1 | ATaaccaataatAA |
| 204 | tataaccaataata | 6429 | 6442 | 2-10-2 | 204_1 | TAtaaccaataaTA |
| 205 | gtataaccaataat | 6430 | 6443 | 2-10-2 | 205_1 | GTataaccaataAT |
| 206 | acatcacacaattt | 7415 | 7428 | 2-10-2 | 206_1 | ACatcacacaatTT |
| 207 | gacatcacacaatt | 7416 | 7429 | 2-10-2 | 207_1 | GAcatcacacaaTT |
| 208 | tgacatcacacaat | 7417 | 7430 | 2-10-2 | 208_1 | TGacatcacacaAT |
| 209 | ctgacatcacacaa | 7418 | 7431 | 2-10-2 | 209_1 | CTgacatcacacAA |
| 210 | tctgacatcacaca | 7419 | 7432 | 2-10-2 | 210_1 | TCtgacatcacaCA |
| 211 | atctgacatcacac | 7420 | 7433 | 2-10-2 | 211_1 | ATctgacatcacAC |
| 212 | ttccttaacccaac | 7436 | 7449 | 2-10-2 | 212_1 | TTccttaacccaAC |
| 213 | attccttaacccaa | 7437 | 7450 | 2-10-2 | 213_1 | ATtccttaacccAA |
| 214 | tattccttaaccca | 7438 | 7451 | 2-10-2 | 214_1 | TAttccttaaccCA |
| 215 | ctattccttaaccc | 7439 | 7452 | 2-10-2 | 215_1 | CTattccttaacCC |
| 216 | tctattccttaacc | 7440 | 7453 | 2-10-2 | 216_1 | TCtattccttaaCC |
| 217 | gtctattccttaac | 7441 | 7454 | 2-10-2 | 217_1 | GTctattccttaAC |
| 218 | catcaaatctcata | 8609 | 8622 | 2-10-2 | 218_1 | CAtcaaatctcaTA |
| 219 | gcatcaaatctcat | 8610 | 8623 | 2-10-2 | 219_1 | GCatcaaatctcAT |
| 220 | tgcatcaaatctca | 8611 | 8624 | 2-10-2 | 220_1 | TGcatcaaatctCA |
| 221 | atgcatcaaatctc | 8612 | 8625 | 2-10-2 | 221_1 | ATgcatcaaatcTC |
| 222 | aatgcatcaaatct | 8613 | 8626 | 2-10-2 | 222_1 | AAtgcatcaaatCT |
| 223 | attttaaacaaaca | 8637 | 8650 | 2-10-2 | 223_1 | ATtttaaacaaaCA |
| 224 | tattttaaacaaac | 8638 | 8651 | 2-10-2 | 224_1 | TAttttaaacaaAC |
| 225 | ttattttaaacaaa | 8639 | 8652 | 2-10-2 | 225_1 | TTattttaaacaAA |
| 226 | attattttaaacaa | 8640 | 8653 | 2-10-2 | 226_1 | ATtattttaaacAA |
| 227 | aattattttaaaca | 8641 | 8654 | 2-10-2 | 227_1 | AAttattttaaaCA |
| 228 | gaattattttaaac | 8642 | 8655 | 2-10-2 | 228_1 | GAattattttaaAC |
| 229 | ttttacaaatctac | 8693 | 8706 | 2-10-2 | 229_1 | TTttacaaatctAC |
| 230 | attttacaaatcta | 8694 | 8707 | 2-10-2 | 230_1 | ATtttacaaatcTA |
| 231 | tattttacaaatct | 8695 | 8708 | 2-10-2 | 231_1 | TAttttacaaatCT |
| 232 | ttattttacaaatc | 8696 | 8709 | 2-10-2 | 232_1 | TTattttacaaaTC |
| 233 | tttattttacaaat | 8697 | 8710 | 2-10-2 | 233_1 | TTtattttacaaAT |
| 234 | atttattttacaaa | 8698 | 8711 | 2-10-2 | 234_1 | ATttattttacaAA |
| 235 | catttattttacaa | 8699 | 8712 | 2-10-2 | 235_1 | CAtttattttacAA |
| 236 | acatttattttaca | 8700 | 8713 | 2-10-2 | 236_1 | ACatttattttaCA |
| 237 | aacatttattttac | 8701 | 8714 | 2-10-2 | 237_1 | AAcatttattttAC |
| 238 | taacatttatttta | 8702 | 8715 | 2-10-2 | 238_1 | TAacatttatttTA |
| 239 | aatttaatcattaa | 9391 | 9404 | 2-10-2 | 239_1 | AAtttaatcattAA |
| 240 | taatttaatcatta | 9392 | 9405 | 2-10-2 | 240_1 | TAatttaatcatTA |
| 241 | ataatttaatcatt | 9393 | 9406 | 2-10-2 | 241_1 | ATaatttaatcaTT |
| 242 | aataatttaatcat | 9394 | 9407 | 2-10-2 | 242_1 | AAtaatttaatcAT |
| 243 | aaataatttaatca | 9395 | 9408 | 2-10-2 | 243_1 | AAataatttaatCA |
| 244 | taaataatttaatc | 9396 | 9409 | 2-10-2 | 244_1 | TAaataatttaaTC |
| 245 | ctaaataatttaat | 9397 | 9410 | 2-10-2 | 245_1 | CTaaataatttaAT |
| 246 | cctaaataatttaa | 9398 | 9411 | 2-10-2 | 246_1 | CCtaaataatttAA |
| 247 | ccctaaataattta | 9399 | 9412 | 2-10-2 | 247_1 | CCctaaataattTA |
| 248 | cccctaaataattt | 9400 | 9413 | 2-10-2 | 248_1 | CCcctaaataatTT |
| 249 | tcccctaaataatt | 9401 | 9414 | 2-10-2 | 249_1 | TCccctaaataaTT |
| 250 | tatataaaaatcta | 10958 | 10971 | 2-10-2 | 250_1 | TAtataaaaatcTA |
| 251 | ctatataaaaatct | 10959 | 10972 | 2-10-2 | 251_1 | CTatataaaaatCT |
| 252 | tctatataaaaatc | 10960 | 10973 | 2-10-2 | 252_1 | TCtatataaaaaTC |
| 253 | atctatataaaaat | 10961 | 10974 | 2-10-2 | 253_1 | ATctatataaaaAT |
| 254 | tatctatataaaaa | 10962 | 10975 | 2-10-2 | 254_1 | TAtctatataaaAA |
| 255 | ttatctatataaaa | 10963 | 10976 | 2-10-2 | 255_1 | TTatctatataaAA |
| 256 | tttatctatataaa | 10964 | 10977 | 2-10-2 | 256_1 | TTtatctatataAA |
| 257 | ccccactctaatat | 11001 | 11014 | 2-10-2 | 257_1 | CCccactctaatAT |
| 258 | gccccactctaata | 11002 | 11015 | 2-10-2 | 258_1 | GCcccactctaaTA |
| 259 | tgccccactctaat | 11003 | 11016 | 2-10-2 | 259_1 | TGccccactctaAT |
| 260 | atgccccactctaa | 11004 | 11017 | 2-10-2 | 260_1 | ATgccccactctAA |
| 261 | aatgccccactcta | 11005 | 11018 | 2-10-2 | 261_1 | AAtgccccactcTA |
| 262 | aaatgccccactct | 11006 | 11019 | 2-10-2 | 262_1 | AAatgccccactCT |
| 263 | taaatgccccactc | 11007 | 11020 | 2-10-2 | 263_1 | TAaatgccccacTC |
| 264 | ttaaatgccccact | 11008 | 11021 | 2-10-2 | 264_1 | TTaaatgccccaCT |
| 265 | atataaccaccaaa | 11546 | 11559 | 2-10-2 | 265_1 | ATataaccaccaAA |
| 266 | tatataaccaccaa | 11547 | 11560 | 2-10-2 | 266_1 | TAtataaccaccAA |
| 267 | atatataaccacca | 11548 | 11561 | 2-10-2 | 267_1 | ATatataaccacCA |
| 268 | tatatataaccacc | 11549 | 11562 | 2-10-2 | 268_1 | TAtatataaccaCC |
| 269 | atatatataaccac | 11550 | 11563 | 2-10-2 | 269_1 | ATatatataaccAC |
| 270 | aaaattcactatct | 11942 | 11955 | 2-10-2 | 270_1 | AAaattcactatCT |
| 271 | gaaaattcactatc | 11943 | 11956 | 2-10-2 | 271_1 | GAaaattcactaTC |
| 272 | tgaaaattcactat | 11944 | 11957 | 2-10-2 | 272_1 | TGaaaattcactAT |
| 273 | ctgaaaattcacta | 11945 | 11958 | 2-10-2 | 273_1 | CTgaaaattcacTA |
| 274 | tctgaaaattcact | 11946 | 11959 | 2-10-2 | 274_1 | TCtgaaaattcaCT |
| 275 | tactatatacatct | 12176 | 12189 | 2-10-2 | 275_1 | TActatatacatCT |
| 276 | ctactatatacatc | 12177 | 12190 | 2-10-2 | 276_1 | CTactatatacaTC |
| 277 | tctactatatacat | 12178 | 12191 | 2-10-2 | 277_1 | TCtactatatacAT |
| 278 | gtctactatataca | 12179 | 12192 | 2-10-2 | 278_1 | GTctactatataCA |
| 279 | agtctactatatac | 12180 | 12193 | 2-10-2 | 279_1 | AGtctactatatAC |
| 280 | tagtctactatata | 12181 | 12194 | 2-10-2 | 280_1 | TAgtctactataTA |
| 281 | ctagtctactatat | 12182 | 12195 | 2-10-2 | 281_1 | CTagtctactatAT |
| 282 | actagtctactata | 12183 | 12196 | 2-10-2 | 282_1 | ACtagtctactaTA |
| 283 | aactagtctactat | 12184 | 12197 | 2-10-2 | 283_1 | AActagtctactAT |
| 284 | tattctacccataa | 12211 | 12224 | 2-10-2 | 284_1 | TAttctacccatAA |
| 285 | atattctacccata | 12212 | 12225 | 2-10-2 | 285_1 | ATattctacccaTA |
| 286 | tatattctacccat | 12213 | 12226 | 2-10-2 | 286_1 | TAtattctacccAT |
| 287 | gtatattctaccca | 12214 | 12227 | 2-10-2 | 287_1 | GTatattctaccCA |
| 288 | tgtatattctaccc | 12215 | 12228 | 2-10-2 | 288_1 | TGtatattctacCC |
| 289 | atgtatattctacc | 12216 | 12229 | 2-10-2 | 289_1 | ATgtatattctaCC |
| 290 | ccacacaattccta | 12254 | 12267 | 2-10-2 | 290_1 | CCacacaattccTA |
| 291 | accacacaattcct | 12255 | 12268 | 2-10-2 | 291_1 | ACcacacaattcCT |
| 292 | aaccacacaattcc | 12256 | 12269 | 2-10-2 | 292_1 | AAccacacaattCC |
| 293 | aaaccacacaattc | 12257 | 12270 | 2-10-2 | 293_1 | AAaccacacaatTC |
| 294 | aaaaccacacaatt | 12258 | 12271 | 2-10-2 | 294_1 | AAaaccacacaaTT |
| 295 | gaaaaccacacaat | 12259 | 12272 | 2-10-2 | 295_1 | GAaaaccacacaAT |
| 296 | agaaaaccacacaa | 12260 | 12273 | 2-10-2 | 296_1 | AGaaaaccacacAA |
| 297 | cagaaaaccacaca | 12261 | 12274 | 2-10-2 | 297_1 | CAgaaaaccacaCA |
| 298 | ccagaaaaccacac | 12262 | 12275 | 2-10-2 | 298_1 | CCagaaaaccacAC |
| 299 | tccagaaaaccaca | 12263 | 12276 | 2-10-2 | 299_1 | TCcagaaaaccaCA |
| 300 | aaatccataaaaaa | 12327 | 12340 | 2-10-2 | 300_1 | AAatccataaaaAA |
| 301 | taaatccataaaaa | 12328 | 12341 | 2-10-2 | 301_1 | TAaatccataaaAA |
| 302 | ctaaatccataaaa | 12329 | 12342 | 2-10-2 | 302_1 | CTaaatccataaAA |
| 303 | actaaatccataaa | 12330 | 12343 | 2-10-2 | 303_1 | ACtaaatccataAA |
| 304 | cactaaatccataa | 12331 | 12344 | 2-10-2 | 304_1 | CActaaatccatAA |
| 305 | tcactaaatccata | 12332 | 12345 | 2-10-2 | 305_1 | TCactaaatccaTA |
| 306 | atcactaaatccat | 12333 | 12346 | 2-10-2 | 306_1 | ATcactaaatccAT |
| 307 | tatcactaaatcca | 12334 | 12347 | 2-10-2 | 307_1 | TAtcactaaatcCA |
| 308 | atatcactaaatcc | 12335 | 12348 | 2-10-2 | 308_1 | ATatcactaaatCC |
| 309 | tatatcactaaatc | 12336 | 12349 | 2-10-2 | 309_1 | TAtatcactaaaTC |
| 310 | atatatcactaaat | 12337 | 12350 | 2-10-2 | 310_1 | ATatatcactaaAT |
| 311 | gatatatcactaaa | 12338 | 12351 | 2-10-2 | 311_1 | GAtatatcactaAA |
| 312 | agatatatcactaa | 12339 | 12352 | 2-10-2 | 312_1 | AGatatatcactAA |
| 313 | tagatatatcacta | 12340 | 12353 | 2-10-2 | 313_1 | TAgatatatcacTA |
| 314 | tataaatttctcta | 12690 | 12703 | 2-10-2 | 314_1 | TAtaaatttctcTA |
| 315 | atataaatttctct | 12691 | 12704 | 2-10-2 | 315_1 | ATataaatttctCT |
| 316 | tatataaatttctc | 12692 | 12705 | 2-10-2 | 316_1 | TAtataaatttcTC |
| 317 | atatataaatttct | 12693 | 12706 | 2-10-2 | 317_1 | ATatataaatttCT |
| 318 | catatataaatttc | 12694 | 12707 | 2-10-2 | 318_1 | CAtatataaattTC |
| 319 | tcatatataaattt | 12695 | 12708 | 2-10-2 | 319_1 | TCatatataaatTT |
| 320 | ctccattccaaatt | 12739 | 12752 | 2-10-2 | 320_1 | CTccattccaaaTT |
| 321 | actccattccaaat | 12740 | 12753 | 2-10-2 | 321_1 | ACtccattccaaAT |
| 322 | cactccattccaaa | 12741 | 12754 | 2-10-2 | 322_1 | CActccattccaAA |
| 323 | ccactccattccaa | 12742 | 12755 | 2-10-2 | 323_1 | CCactccattccAA |
| 324 | accactccattcca | 12743 | 12756 | 2-10-2 | 324_1 | ACcactccattcCA |
| 325 | aaccactccattcc | 12744 | 12757 | 2-10-2 | 325_1 | AAccactccattCC |
| 326 | aaaccactccattc | 12745 | 12758 | 2-10-2 | 326_1 | AAaccactccatTC |
| 327 | tcacacaaccatat | 13155 | 13168 | 2-10-2 | 327_1 | TCacacaaccatAT |
| 328 | atcacacaaccata | 13156 | 13169 | 2-10-2 | 328_1 | ATcacacaaccaTA |
| 329 | gatcacacaaccat | 13157 | 13170 | 2-10-2 | 329_1 | GAtcacacaaccAT |
| 330 | agatcacacaacca | 13158 | 13171 | 2-10-2 | 330_1 | AGatcacacaacCA |
| 331 | aagatcacacaacc | 13159 | 13172 | 2-10-2 | 331_1 | AAgatcacacaaCC |
| 332 | aaagatcacacaac | 13160 | 13173 | 2-10-2 | 332_1 | AAagatcacacaAC |
| 333 | aaaagatcacacaa | 13161 | 13174 | 2-10-2 | 333_1 | AAaagatcacacAA |
| 334 | taaaagatcacaca | 13162 | 13175 | 2-10-2 | 334_1 | TAaaagatcacaCA |
| 335 | ttcatttctaaaaa | 13297 | 13310 | 2-10-2 | 335_1 | TTcatttctaaaAA |
| 336 | tttcatttctaaaa | 13298 | 13311 | 2-10-2 | 336_1 | TTtcatttctaaAA |
| 337 | ctttcatttctaaa | 13299 | 13312 | 2-10-2 | 337_1 | CTttcatttctaAA |
| 338 | tctttcatttctaa | 13300 | 13313 | 2-10-2 | 338_1 | TCtttcatttctAA |
| 339 | atctttcatttcta | 13301 | 13314 | 2-10-2 | 339_1 | ATctttcatttcTA |
| 340 | gatctttcatttct | 13302 | 13315 | 2-10-2 | 340_1 | GAtctttcatttCT |
| 341 | tgatctttcatttc | 13303 | 13316 | 2-10-2 | 341_1 | TGatctttcattTC |
| 342 | atgatctttcattt | 13304 | 13317 | 2-10-2 | 342_1 | ATgatctttcatTT |
| 343 | ataaaaacccactt | 13990 | 14003 | 2-10-2 | 343_1 | ATaaaaacccacTT |
| 344 | cataaaaacccact | 13991 | 14004 | 2-10-2 | 344_1 | CAtaaaaacccaCT |
| 345 | acataaaaacccac | 13992 | 14005 | 2-10-2 | 345_1 | ACataaaaacccAC |
| 346 | cacataaaaaccca | 13993 | 14006 | 2-10-2 | 346_1 | CAcataaaaaccCA |
| 347 | tcacataaaaaccc | 13994 | 14007 | 2-10-2 | 347_1 | TCacataaaaacCC |
| 348 | atcacataaaaacc | 13995 | 14008 | 2-10-2 | 348_1 | ATcacataaaaaCC |
| 349 | catcacataaaaac | 13996 | 14009 | 2-10-2 | 349_1 | CAtcacataaaaAC |
| 350 | tcatcacataaaaa | 13997 | 14010 | 2-10-2 | 350_1 | TCatcacataaaAA |
| 351 | gtcatcacataaaa | 13998 | 14011 | 2-10-2 | 351_1 | GTcatcacataaAA |
| 352 | agtcatcacataaa | 13999 | 14012 | 2-10-2 | 352_1 | AGtcatcacataAA |
| 353 | tagtcatcacataa | 14000 | 14013 | 2-10-2 | 353_1 | TAgtcatcacatAA |
| 354 | atagtcatcacata | 14001 | 14014 | 2-10-2 | 354_1 | ATagtcatcacaTA |
| 355 | catagtcatcacat | 14002 | 14015 | 2-10-2 | 355_1 | CAtagtcatcacAT |
| 356 | taaatacaaatcta | 14041 | 14054 | 2-10-2 | 356_1 | TAaatacaaatcTA |
| 357 | ctaaatacaaatct | 14042 | 14055 | 2-10-2 | 357_1 | CTaaatacaaatCT |
| 358 | gctaaatacaaatc | 14043 | 14056 | 2-10-2 | 358_1 | GCtaaatacaaaTC |
| 359 | tgctaaatacaaat | 14044 | 14057 | 2-10-2 | 359_1 | TGctaaatacaaAT |
| 360 | atgctaaatacaaa | 14045 | 14058 | 2-10-2 | 360_1 | ATgctaaatacaAA |
| 361 | tatgctaaatacaa | 14046 | 14059 | 2-10-2 | 361_1 | TAtgctaaatacAA |
| 362 | aatcttacactaaa | 14119 | 14132 | 2-10-2 | 362_1 | AAtcttacactaAA |
| 363 | taatcttacactaa | 14120 | 14133 | 2-10-2 | 363_1 | TAatcttacactAA |
| 364 | ataatcttacacta | 14121 | 14134 | 2-10-2 | 364_1 | ATaatcttacacTA |
| 365 | aataatcttacact | 14122 | 14135 | 2-10-2 | 365_1 | AAtaatcttacaCT |
| 366 | gaataatcttacac | 14123 | 14136 | 2-10-2 | 366_1 | GAataatcttacAC |
| 367 | tgaataatcttaca | 14124 | 14137 | 2-10-2 | 367_1 | TGaataatcttaCA |
| 368 | atgaataatcttac | 14125 | 14138 | 2-10-2 | 368_1 | ATgaataatcttAC |
| 369 | caaaattctaataa | 14257 | 14270 | 2-10-2 | 369_1 | CAaaattctaatAA |
| 370 | tcaaaattctaata | 14258 | 14271 | 2-10-2 | 370_1 | TCaaaattctaaTA |
| 371 | ttcaaaattctaat | 14259 | 14272 | 2-10-2 | 371_1 | TTcaaaattctaAT |
| 372 | attcaaaattctaa | 14260 | 14273 | 2-10-2 | 372_1 | ATtcaaaattctAA |
| 373 | gattcaaaattcta | 14261 | 14274 | 2-10-2 | 373_1 | GAttcaaaattcTA |
| 374 | agattcaaaattct | 14262 | 14275 | 2-10-2 | 374_1 | AGattcaaaattCT |
| 375 | attactacaaccaa | 14570 | 14583 | 2-10-2 | 375_1 | ATtactacaaccAA |
| 376 | cattactacaacca | 14571 | 14584 | 2-10-2 | 376_1 | CAttactacaacCA |
| 377 | ccattactacaacc | 14572 | 14585 | 2-10-2 | 377_1 | CCattactacaaCC |
| 378 | accattactacaac | 14573 | 14586 | 2-10-2 | 378_1 | ACcattactacaAC |
| 379 | aaccattactacaa | 14574 | 14587 | 2-10-2 | 379_1 | AAccattactacAA |
| 380 | aaaccattactaca | 14575 | 14588 | 2-10-2 | 380_1 | AAaccattactaCA |
| 381 | gaaaccattactac | 14576 | 14589 | 2-10-2 | 381_1 | GAaaccattactAC |
| 382 | tgaaaccattacta | 14577 | 14590 | 2-10-2 | 382_1 | TGaaaccattacTA |
| 383 | atgaaaccattact | 14578 | 14591 | 2-10-2 | 383_1 | ATgaaaccattaCT |
| 384 | atttttaaaaacac | 15778 | 15791 | 2-10-2 | 384_1 | ATttttaaaaacAC |
| 385 | aatttttaaaaaca | 15779 | 15792 | 2-10-2 | 385_1 | AAtttttaaaaaCA |
| 386 | taatttttaaaaac | 15780 | 15793 | 2-10-2 | 386_1 | TAatttttaaaaAC |
| 387 | ataatttttaaaaa | 15781 | 15794 | 2-10-2 | 387_1 | ATaatttttaaaAA |
| 388 | cataatttttaaaa | 15782 | 15795 | 2-10-2 | 388_1 | CAtaatttttaaAA |
| 389 | tcataatttttaaa | 15783 | 15796 | 2-10-2 | 389_1 | TCataatttttaAA |
| 390 | atcataatttttaa | 15784 | 15797 | 2-10-2 | 390_1 | ATcataatttttAA |
| 391 | ctttatacaaaaaa | 15814 | 15827 | 2-10-2 | 391_1 | CTttatacaaaaAA |
| 392 | actttatacaaaaa | 15815 | 15828 | 2-10-2 | 392_1 | ACtttatacaaaAA |
| 393 | tactttatacaaaa | 15816 | 15829 | 2-10-2 | 393_1 | TActttatacaaAA |
| 394 | ttactttatacaaa | 15817 | 15830 | 2-10-2 | 394_1 | TTactttatacaAA |
| 395 | cttactttatacaa | 15818 | 15831 | 2-10-2 | 395_1 | CTtactttatacAA |
| 396 | gcttactttataca | 15819 | 15832 | 2-10-2 | 396_1 | GCttactttataCA |
| 397 | tgcttactttatac | 15820 | 15833 | 2-10-2 | 397_1 | TGcttactttatAC |
| 398 | tctcaaaataataa | 15877 | 15890 | 2-10-2 | 398_1 | TCtcaaaataatAA |
| 399 | ctctcaaaataata | 15878 | 15891 | 2-10-2 | 399_1 | CTctcaaaataaTA |
| 400 | tctctcaaaataat | 15879 | 15892 | 2-10-2 | 400_1 | TCtctcaaaataAT |
| 401 | atctctcaaaataa | 15880 | 15893 | 2-10-2 | 401_1 | ATctctcaaaatAA |
| 402 | aatctctcaaaata | 15881 | 15894 | 2-10-2 | 402_1 | AAtctctcaaaaTA |
| 403 | aaatctctcaaaat | 15882 | 15895 | 2-10-2 | 403_1 | AAatctctcaaaAT |
| 404 | taaatctctcaaaa | 15883 | 15896 | 2-10-2 | 404_1 | TAaatctctcaaAA |
| 405 | ttaaatctctcaaa | 15884 | 15897 | 2-10-2 | 405_1 | TTaaatctctcaAA |
| 406 | tttaaatctctcaa | 15885 | 15898 | 2-10-2 | 406_1 | TTtaaatctctcAA |
| 407 | ttttaaatctctca | 15886 | 15899 | 2-10-2 | 407_1 | TTttaaatctctCA |
| 408 | taatactttttcca | 16080 | 16093 | 2-10-2 | 408_1 | TAatactttttcCA |
| 409 | ttaatactttttcc | 16081 | 16094 | 2-10-2 | 409_1 | TTaatactttttCC |
| 410 | gttaatactttttc | 16082 | 16095 | 2-10-2 | 410_1 | GTtaatacttttTC |
| 411 | tgttaatacttttt | 16083 | 16096 | 2-10-2 | 411_1 | TGttaatactttTT |
| 412 | atgttaatactttt | 16084 | 16097 | 2-10-2 | 412_1 | ATgttaatacttTT |
| 413 | ttatcactaccaca | 16187 | 16200 | 2-10-2 | 413_1 | TTatcactaccaCA |
| 414 | tttatcactaccac | 16188 | 16201 | 2-10-2 | 414_1 | TTtatcactaccAC |
| 415 | atttatcactacca | 16189 | 16202 | 2-10-2 | 415_1 | ATttatcactacCA |
| 416 | catttatcactacc | 16190 | 16203 | 2-10-2 | 416_1 | CAtttatcactaCC |
| 417 | tcatttatcactac | 16191 | 16204 | 2-10-2 | 417_1 | TCatttatcactAC |
| 418 | atcatttatcacta | 16192 | 16205 | 2-10-2 | 418_1 | ATcatttatcacTA |
| 419 | catcatttatcact | 16193 | 16206 | 2-10-2 | 419_1 | CAtcatttatcaCT |
| 420 | acatcatttatcac | 16194 | 16207 | 2-10-2 | 420_1 | ACatcatttatcAC |
| 421 | aacatcatttatca | 16195 | 16208 | 2-10-2 | 421_1 | AAcatcatttatCA |
| 422 | taacatcatttatc | 16196 | 16209 | 2-10-2 | 422_1 | TAacatcatttaTC |
| 423 | ttaacatcatttat | 16197 | 16210 | 2-10-2 | 423_1 | TTaacatcatttAT |
| 424 | attaacatcattta | 16198 | 16211 | 2-10-2 | 424_1 | ATtaacatcattTA |
| 425 | aattaacatcattt | 16199 | 16212 | 2-10-2 | 425_1 | AAttaacatcatTT |
| 426 | taattaacatcatt | 16200 | 16213 | 2-10-2 | 426_1 | TAattaacatcaTT |
| 427 | ctaattaacatcat | 16201 | 16214 | 2-10-2 | 427_1 | CTaattaacatcAT |
| 428 | cctaattaacatca | 16202 | 16215 | 2-10-2 | 428_1 | CCtaattaacatCA |
| 429 | ccctaattaacatc | 16203 | 16216 | 2-10-2 | 429_1 | CCctaattaacaTC |
| 430 | gccctaattaacat | 16204 | 16217 | 2-10-2 | 430_1 | GCcctaattaacAT |
| 431 | ggccctaattaaca | 16205 | 16218 | 2-10-2 | 431_1 | GGccctaattaaCA |
| 432 | cggccctaattaac | 16206 | 16219 | 2-10-2 | 432_1 | CGgccctaattaAC |
| 433 | aaacacattttttt | 16494 | 16507 | 2-10-2 | 433_1 | AAacacatttttTT |
| 434 | taaacacatttttt | 16495 | 16508 | 2-10-2 | 434_1 | TAaacacattttTT |
| 435 | ataaacacattttt | 16496 | 16509 | 2-10-2 | 435_1 | ATaaacacatttTT |
| 436 | tataaacacatttt | 16497 | 16510 | 2-10-2 | 436_1 | TAtaaacacattTT |
| 437 | atataaacacattt | 16498 | 16511 | 2-10-2 | 437_1 | ATataaacacatTT |
| 438 | catataaacacatt | 16499 | 16512 | 2-10-2 | 438_1 | CAtataaacacaTT |
| 439 | acatataaacacat | 16500 | 16513 | 2-10-2 | 439_1 | ACatataaacacAT |
| 440 | aacatataaacaca | 16501 | 16514 | 2-10-2 | 440_1 | AAcatataaacaCA |
| 441 | taacatataaacac | 16502 | 16515 | 2-10-2 | 441_1 | TAacatataaacAC |
| 442 | ataacatataaaca | 16503 | 16516 | 2-10-2 | 442_1 | ATaacatataaaCA |
| 443 | tataacatataaac | 16504 | 16517 | 2-10-2 | 443_1 | TAtaacatataaAC |
| 444 | atataacatataaa | 16505 | 16518 | 2-10-2 | 444_1 | ATataacatataAA |
| 445 | catataacatataa | 16506 | 16519 | 2-10-2 | 445_1 | CAtataacatatAA |
| 446 | acatataacatata | 16507 | 16520 | 2-10-2 | 446_1 | ACatataacataTA |
| 447 | cacatataacatat | 16508 | 16521 | 2-10-2 | 447_1 | CAcatataacatAT |
| 448 | tcacatataacata | 16509 | 16522 | 2-10-2 | 448_1 | TCacatataacaTA |
| 449 | atcacatataacat | 16510 | 16523 | 2-10-2 | 449_1 | ATcacatataacAT |
| 450 | tatcacatataaca | 16511 | 16524 | 2-10-2 | 450_1 | TAtcacatataaCA |
| 451 | ctatcacatataac | 16512 | 16525 | 2-10-2 | 451_1 | CTatcacatataAC |
| 452 | actatcacatataa | 16513 | 16526 | 2-10-2 | 452_1 | ACtatcacatatAA |
| 453 | cactatcacatata | 16514 | 16527 | 2-10-2 | 453_1 | CActatcacataTA |
| 454 | gtccaacataactc | 16834 | 16847 | 2-10-2 | 454_1 | GTccaacataacTC |
| 455 | agtccaacataact | 16835 | 16848 | 2-10-2 | 455_1 | AGtccaacataaCT |
| 456 | cagtccaacataac | 16836 | 16849 | 2-10-2 | 456_1 | CAgtccaacataAC |
| 457 | tcagtccaacataa | 16837 | 16850 | 2-10-2 | 457_1 | TCagtccaacatAA |
| 458 | atcagtccaacata | 16838 | 16851 | 2-10-2 | 458_1 | ATcagtccaacaTA |
| 459 | tatcagtccaacat | 16839 | 16852 | 2-10-2 | 459_1 | TAtcagtccaacAT |
| 460 | aaaccctcccaaaa | 16921 | 16934 | 2-10-2 | 460_1 | AAaccctcccaaAA |
| 461 | taaaccctcccaaa | 16922 | 16935 | 2-10-2 | 461_1 | TAaaccctcccaAA |
| 462 | ttaaaccctcccaa | 16923 | 16936 | 2-10-2 | 462_1 | TTaaaccctcccAA |
| 463 | attaaaccctccca | 16924 | 16937 | 2-10-2 | 463_1 | ATtaaaccctccCA |
| 464 | cattaaaccctccc | 16925 | 16938 | 2-10-2 | 464_1 | CAttaaaccctcCC |
| 465 | acattaaaccctcc | 16926 | 16939 | 2-10-2 | 465_1 | ACattaaaccctCC |
| 466 | aacattaaaccctc | 16927 | 16940 | 2-10-2 | 466_1 | AAcattaaacccTC |
| 467 | aaacattaaaccct | 16928 | 16941 | 2-10-2 | 467_1 | AAacattaaaccCT |
| 468 | taaacattaaaccc | 16929 | 16942 | 2-10-2 | 468_1 | TAaacattaaacCC |
| 469 | ataaacattaaacc | 16930 | 16943 | 2-10-2 | 469_1 | ATaaacattaaaCC |
| 470 | tataaacattaaac | 16931 | 16944 | 2-10-2 | 470_1 | TAtaaacattaaAC |
| 471 | ctataaacattaaa | 16932 | 16945 | 2-10-2 | 471_1 | CTataaacattaAA |
| 472 | actataaacattaa | 16933 | 16946 | 2-10-2 | 472_1 | ACtataaacattAA |
| 473 | aactataaacatta | 16934 | 16947 | 2-10-2 | 473_1 | AActataaacatTA |
| 474 | aaactataaacatt | 16935 | 16948 | 2-10-2 | 474_1 | AAactataaacaTT |
| 475 | taaactataaacat | 16936 | 16949 | 2-10-2 | 475_1 | TAaactataaacAT |
| 476 | ttaaactataaaca | 16937 | 16950 | 2-10-2 | 476_1 | TTaaactataaaCA |
| 477 | tttaaactataaac | 16938 | 16951 | 2-10-2 | 477_1 | TTtaaactataaAC |
| 478 | ctttaaactataaa | 16939 | 16952 | 2-10-2 | 478_1 | CTttaaactataAA |
| 479 | gctttaaactataa | 16940 | 16953 | 2-10-2 | 479_1 | GCtttaaactatAA |
| 480 | tgctttaaactata | 16941 | 16954 | 2-10-2 | 480_1 | TGctttaaactaTA |
| 481 | cagcctatcaccac | 18018 | 18031 | 2-10-2 | 481_1 | CAgcctatcaccAC |
| 482 | acagcctatcacca | 18019 | 18032 | 2-10-2 | 482_1 | ACagcctatcacCA |
| 483 | cacagcctatcacc | 18020 | 18033 | 2-10-2 | 483_1 | CAcagcctatcaCC |
| 484 | tcacagcctatcac | 18021 | 18034 | 2-10-2 | 484_1 | TCacagcctatcAC |
| 485 | atcacagcctatca | 18022 | 18035 | 2-10-2 | 485_1 | ATcacagcctatCA |
| 486 | aatcacagcctatc | 18023 | 18036 | 2-10-2 | 486_1 | AAtcacagcctaTC |
| 487 | aaatcacagcctat | 18024 | 18037 | 2-10-2 | 487_1 | AAatcacagcctAT |
| 488 | caaatcacagccta | 18025 | 18038 | 2-10-2 | 488_1 | CAaatcacagccTA |
| 489 | ccaaatcacagcct | 18026 | 18039 | 2-10-2 | 489_1 | CCaaatcacagcCT |
| 490 | cccaaatcacagcc | 18027 | 18040 | 2-10-2 | 490_1 | CCcaaatcacagCC |
| 491 | acccaaatcacagc | 18028 | 18041 | 2-10-2 | 491_1 | ACccaaatcacaGC |
| 492 | cacccaaatcacag | 18029 | 18042 | 2-10-2 | 492_1 | CAcccaaatcacAG |
| 493 | tcacccaaatcaca | 18030 | 18043 | 2-10-2 | 493_1 | TCacccaaatcaCA |
| 494 | gtcacccaaatcac | 18031 | 18044 | 2-10-2 | 494_1 | GTcacccaaatcAC |
| 495 | cgtcacccaaatca | 18032 | 18045 | 2-10-2 | 495_1 | CGtcacccaaatCA |
| 496 | gcgtcacccaaatc | 18033 | 18046 | 2-10-2 | 496_1 | GCgtcacccaaaTC |
| 497 | agcgtcacccaaat | 18034 | 18047 | 2-10-2 | 497_1 | AGcgtcacccaaAT |
| 498 | atcctaaaatcact | 18630 | 18643 | 2-10-2 | 498_1 | ATcctaaaatcaCT |
| 499 | gatcctaaaatcac | 18631 | 18644 | 2-10-2 | 499_1 | GAtcctaaaatcAC |
| 500 | agatcctaaaatca | 18632 | 18645 | 2-10-2 | 500_1 | AGatcctaaaatCA |
| 501 | cagatcctaaaatc | 18633 | 18646 | 2-10-2 | 501_1 | CAgatcctaaaaTC |
| 502 | tcagatcctaaaat | 18634 | 18647 | 2-10-2 | 502_1 | TCagatcctaaaAT |
| 503 | aaaccaatcatcat | 19107 | 19120 | 2-10-2 | 503_1 | AAaccaatcatcAT |
| 504 | aaaaccaatcatca | 19108 | 19121 | 2-10-2 | 504_1 | AAaaccaatcatCA |
| 505 | taaaaccaatcatc | 19109 | 19122 | 2-10-2 | 505_1 | TAaaaccaatcaTC |
| 506 | gtaaaaccaatcat | 19110 | 19123 | 2-10-2 | 506_1 | GTaaaaccaatcAT |
| 507 | agtaaaaccaatca | 19111 | 19124 | 2-10-2 | 507_1 | AGtaaaaccaatCA |
| 508 | aagtaaaaccaatc | 19112 | 19125 | 2-10-2 | 508_1 | AAgtaaaaccaaTC |
| 509 | aaagtaaaaccaat | 19113 | 19126 | 2-10-2 | 509_1 | AAagtaaaaccaAT |
| 510 | catctctactaaaa | 20214 | 20227 | 2-10-2 | 510_1 | CAtctctactaaAA |
| 511 | ccatctctactaaa | 20215 | 20228 | 2-10-2 | 511_1 | CCatctctactaAA |
| 512 | tccatctctactaa | 20216 | 20229 | 2-10-2 | 512_1 | TCcatctctactAA |
| 513 | ttccatctctacta | 20217 | 20230 | 2-10-2 | 513_1 | TTccatctctacTA |
| 514 | cttccatctctact | 20218 | 20231 | 2-10-2 | 514_1 | CTtccatctctaCT |
| 515 | ccttccatctctac | 20219 | 20232 | 2-10-2 | 515_1 | CCttccatctctAC |
| 516 | cccttccatctcta | 20220 | 20233 | 2-10-2 | 516_1 | CCcttccatctcTA |
| 517 | acataacaaaccca | 20555 | 20568 | 2-10-2 | 517_1 | ACataacaaaccCA |
| 518 | tacataacaaaccc | 20556 | 20569 | 2-10-2 | 518_1 | TAcataacaaacCC |
| 519 | ctacataacaaacc | 20557 | 20570 | 2-10-2 | 519_1 | CTacataacaaaCC |
| 520 | actacataacaaac | 20558 | 20571 | 2-10-2 | 520_1 | ACtacataacaaAC |
| 521 | aactacataacaaa | 20559 | 20572 | 2-10-2 | 521_1 | AActacataacaAA |
| 522 | taactacataacaa | 20560 | 20573 | 2-10-2 | 522_1 | TAactacataacAA |
| 523 | ataactacataaca | 20561 | 20574 | 2-10-2 | 523_1 | ATaactacataaCA |
| 524 | aataactacataac | 20562 | 20575 | 2-10-2 | 524_1 | AAtaactacataAC |
| 525 | caataactacataa | 20563 | 20576 | 2-10-2 | 525_1 | CAataactacatAA |
| 526 | acaataactacata | 20564 | 20577 | 2-10-2 | 526_1 | ACaataactacaTA |
| 527 | cacaataactacat | 20565 | 20578 | 2-10-2 | 527_1 | CAcaataactacAT |
| 528 | tcacaataactaca | 20566 | 20579 | 2-10-2 | 528_1 | TCacaataactaCA |
| 529 | ttcacaataactac | 20567 | 20580 | 2-10-2 | 529_1 | TTcacaataactAC |
| 530 | attcacaataacta | 20568 | 20581 | 2-10-2 | 530_1 | ATtcacaataacTA |
| 531 | aattcacaataact | 20569 | 20582 | 2-10-2 | 531_1 | AAttcacaataaCT |
| 532 | gaattcacaataac | 20570 | 20583 | 2-10-2 | 532_1 | GAattcacaataAC |
| 533 | tgaattcacaataa | 20571 | 20584 | 2-10-2 | 533_1 | TGaattcacaatAA |
| 534 | ctaaaacaatctaa | 22073 | 22086 | 2-10-2 | 534_1 | CTaaaacaatctAA |
| 535 | cctaaaacaatcta | 22074 | 22087 | 2-10-2 | 535_1 | CCtaaaacaatcTA |
| 536 | acctaaaacaatct | 22075 | 22088 | 2-10-2 | 536_1 | ACctaaaacaatCT |
| 537 | tacctaaaacaatc | 22076 | 22089 | 2-10-2 | 537_1 | TAcctaaaacaaTC |
| 538 | atacctaaaacaat | 22077 | 22090 | 2-10-2 | 538_1 | ATacctaaaacaAT |
| 539 | tatacctaaaacaa | 22078 | 22091 | 2-10-2 | 539_1 | TAtacctaaaacAA |
| 540 | ctatacctaaaaca | 22079 | 22092 | 2-10-2 | 540_1 | CTatacctaaaaCA |
| 541 | gctatacctaaaac | 22080 | 22093 | 2-10-2 | 541_1 | GCtatacctaaaAC |
| 542 | ttgtaactaaaaat | 22254 | 22267 | 2-10-2 | 542_1 | TTgtaactaaaaAT |
| 543 | cttgtaactaaaaa | 22255 | 22268 | 2-10-2 | 543_1 | CTtgtaactaaaAA |
| 544 | ccttgtaactaaaa | 22256 | 22269 | 2-10-2 | 544_1 | CCttgtaactaaAA |
| 545 | cccttgtaactaaa | 22257 | 22270 | 2-10-2 | 545_1 | CCcttgtaactaAA |
| 546 | ccccttgtaactaa | 22258 | 22271 | 2-10-2 | 546_1 | CCccttgtaactAA |
| 547 | accccttgtaacta | 22259 | 22272 | 2-10-2 | 547_1 | ACcccttgtaacTA |
| 548 | caccccttgtaact | 22260 | 22273 | 2-10-2 | 548_1 | CAccccttgtaaCT |
| 549 | acaccccttgtaac | 22261 | 22274 | 2-10-2 | 549_1 | ACaccccttgtaAC |
| 550 | ttcatatatacatc | 22424 | 22437 | 2-10-2 | 550_1 | TTcatatatacaTC |
| 551 | cttcatatatacat | 22425 | 22438 | 2-10-2 | 551_1 | CTtcatatatacAT |
| 552 | ccttcatatataca | 22426 | 22439 | 2-10-2 | 552_1 | CCttcatatataCA |
| 553 | cccttcatatatac | 22427 | 22440 | 2-10-2 | 553_1 | CCcttcatatatAC |
| 554 | acccttcatatata | 22428 | 22441 | 2-10-2 | 554_1 | ACccttcatataTA |
| 555 | tacccttcatatat | 22429 | 22442 | 2-10-2 | 555_1 | TAcccttcatatAT |
| 556 | ttacccttcatata | 22430 | 22443 | 2-10-2 | 556_1 | TTacccttcataTA |
| 557 | attacccttcatat | 22431 | 22444 | 2-10-2 | 557_1 | ATtacccttcatAT |
| 558 | cattacccttcata | 22432 | 22445 | 2-10-2 | 558_1 | CAttacccttcaTA |
| 559 | acattacccttcat | 22433 | 22446 | 2-10-2 | 559_1 | ACattacccttcAT |
| 560 | tacattacccttca | 22434 | 22447 | 2-10-2 | 560_1 | TAcattacccttCA |
| 561 | tcttatacttacta | 23204 | 23217 | 2-10-2 | 561_1 | TCttatacttacTA |
| 562 | ttcttatacttact | 23205 | 23218 | 2-10-2 | 562_1 | TTcttatacttaCT |
| 563 | attcttatacttac | 23206 | 23219 | 2-10-2 | 563_1 | ATtcttatacttAC |
| 564 | gattcttatactta | 23207 | 23220 | 2-10-2 | 564_1 | GAttcttatactTA |
| 565 | tgattcttatactt | 23208 | 23221 | 2-10-2 | 565_1 | TGattcttatacTT |
| 566 | atgattcttatact | 23209 | 23222 | 2-10-2 | 566_1 | ATgattcttataCT |
| 567 | aacttcactaaaat | 23616 | 23629 | 2-10-2 | 567_1 | AActtcactaaaAT |
| 568 | aaacttcactaaaa | 23617 | 23630 | 2-10-2 | 568_1 | AAacttcactaaAA |
| 569 | taaacttcactaaa | 23618 | 23631 | 2-10-2 | 569_1 | TAaacttcactaAA |
| 570 | ataaacttcactaa | 23619 | 23632 | 2-10-2 | 570_1 | ATaaacttcactAA |
| 571 | aataaacttcacta | 23620 | 23633 | 2-10-2 | 571_1 | AAtaaacttcacTA |
| 572 | taataaacttcact | 23621 | 23634 | 2-10-2 | 572_1 | TAataaacttcaCT |
| 573 | ctaataaacttcac | 23622 | 23635 | 2-10-2 | 573_1 | CTaataaacttcAC |
| 574 | actaataaacttca | 23623 | 23636 | 2-10-2 | 574_1 | ACtaataaacttCA |
| 575 | aactaataaacttc | 23624 | 23637 | 2-10-2 | 575_1 | AActaataaactTC |
| 576 | aatcttctatttta | 24108 | 24121 | 2-10-2 | 576_1 | AAtcttctatttTA |
| 577 | caatcttctatttt | 24109 | 24122 | 2-10-2 | 577_1 | CAatcttctattTT |
| 578 | ccaatcttctattt | 24110 | 24123 | 2-10-2 | 578_1 | CCaatcttctatTT |
| 579 | accaatcttctatt | 24111 | 24124 | 2-10-2 | 579_1 | ACcaatcttctaTT |
| 580 | aaccaatcttctat | 24112 | 24125 | 2-10-2 | 580_1 | AAccaatcttctAT |
| 581 | caaccaatcttcta | 24113 | 24126 | 2-10-2 | 581_1 | CAaccaatcttcTA |
| 582 | gcaaccaatcttct | 24114 | 24127 | 2-10-2 | 582_1 | GCaaccaatcttCT |
| 583 | tgcaaccaatcttc | 24115 | 24128 | 2-10-2 | 583_1 | TGcaaccaatctTC |
| 584 | ctgcaaccaatctt | 24116 | 24129 | 2-10-2 | 584_1 | CTgcaaccaatcTT |
| 585 | actgcaaccaatct | 24117 | 24130 | 2-10-2 | 585_1 | ACtgcaaccaatCT |
| 586 | aactgcaaccaatc | 24118 | 24131 | 2-10-2 | 586_1 | AActgcaaccaaTC |
| 587 | taactgcaaccaat | 24119 | 24132 | 2-10-2 | 587_1 | TAactgcaaccaAT |
| 588 | tacaacacacatca | 24335 | 24348 | 2-10-2 | 588_1 | TAcaacacacatCA |
| 589 | atacaacacacatc | 24336 | 24349 | 2-10-2 | 589_1 | ATacaacacacaTC |
| 590 | aatacaacacacat | 24337 | 24350 | 2-10-2 | 590_1 | AAtacaacacacAT |
| 591 | gaatacaacacaca | 24338 | 24351 | 2-10-2 | 591_1 | GAatacaacacaCA |
| 592 | tgaatacaacacac | 24339 | 24352 | 2-10-2 | 592_1 | TGaatacaacacAC |
| 593 | atgaatacaacaca | 24340 | 24353 | 2-10-2 | 593_1 | ATgaatacaacaCA |
| 594 | cctaataaaatata | 24499 | 24512 | 2-10-2 | 594_1 | CCtaataaaataTA |
| 595 | tcctaataaaatat | 24500 | 24513 | 2-10-2 | 595_1 | TCctaataaaatAT |
| 596 | ctcctaataaaata | 24501 | 24514 | 2-10-2 | 596_1 | CTcctaataaaaTA |
| 597 | actcctaataaaat | 24502 | 24515 | 2-10-2 | 597_1 | ACtcctaataaaAT |
| 598 | tactcctaataaaa | 24503 | 24516 | 2-10-2 | 598_1 | TActcctaataaAA |
| 599 | ctactcctaataaa | 24504 | 24517 | 2-10-2 | 599_1 | CTactcctaataAA |
| 600 | actactcctaataa | 24505 | 24518 | 2-10-2 | 600_1 | ACtactcctaatAA |
| 601 | aactactcctaata | 24506 | 24519 | 2-10-2 | 601_1 | AActactcctaaTA |
| 602 | taactactcctaat | 24507 | 24520 | 2-10-2 | 602_1 | TAactactcctaAT |
| 603 | ataactactcctaa | 24508 | 24521 | 2-10-2 | 603_1 | ATaactactcctAA |
| 604 | tataactactccta | 24509 | 24522 | 2-10-2 | 604_1 | TAtaactactccTA |
| 605 | atataactactcct | 24510 | 24523 | 2-10-2 | 605_1 | ATataactactcCT |
| 606 | aatataactactcc | 24511 | 24524 | 2-10-2 | 606_1 | AAtataactactCC |
| 607 | aaatataactactc | 24512 | 24525 | 2-10-2 | 607_1 | AAatataactacTC |
| 608 | aaaatataactact | 24513 | 24526 | 2-10-2 | 608_1 | AAaatataactaCT |
| 609 | aaaaatataactac | 24514 | 24527 | 2-10-2 | 609_1 | AAaaatataactAC |
| 610 | taaaaatataacta | 24515 | 24528 | 2-10-2 | 610_1 | TAaaaatataacTA |
| 611 | gtaaaaatataact | 24516 | 24529 | 2-10-2 | 611_1 | GTaaaaatataaCT |
| 612 | agtaaaaatataac | 24517 | 24530 | 2-10-2 | 612_1 | AGtaaaaatataAC |
| 613 | actgatacccacaa | 24593 | 24606 | 2-10-2 | 613_1 | ACtgatacccacAA |
| 614 | aactgatacccaca | 24594 | 24607 | 2-10-2 | 614_1 | AActgatacccaCA |
| 615 | caactgatacccac | 24595 | 24608 | 2-10-2 | 615_1 | CAactgatacccAC |
| 616 | tcaactgataccca | 24596 | 24609 | 2-10-2 | 616_1 | TCaactgataccCA |
| 617 | atcactaaaaaact | 24752 | 24765 | 2-10-2 | 617_1 | ATcactaaaaaaCT |
| 618 | tatcactaaaaaac | 24753 | 24766 | 2-10-2 | 618_1 | TAtcactaaaaaAC |
| 619 | atatcactaaaaaa | 24754 | 24767 | 2-10-2 | 619_1 | ATatcactaaaaAA |
| 620 | tatatcactaaaaa | 24755 | 24768 | 2-10-2 | 620_1 | TAtatcactaaaAA |
| 621 | ttatatcactaaaa | 24756 | 24769 | 2-10-2 | 621_1 | TTatatcactaaAA |
| 622 | tttatatcactaaa | 24757 | 24770 | 2-10-2 | 622_1 | TTtatatcactaAA |
| 623 | gtttatatcactaa | 24758 | 24771 | 2-10-2 | 623_1 | GTttatatcactAA |
| 624 | aaacttttaattaa | 24850 | 24863 | 2-10-2 | 624_1 | AAacttttaattAA |
| 625 | caaacttttaatta | 24851 | 24864 | 2-10-2 | 625_1 | CAaacttttaatTA |
| 626 | tcaaacttttaatt | 24852 | 24865 | 2-10-2 | 626_1 | TCaaacttttaaTT |
| 627 | ttcaaacttttaat | 24853 | 24866 | 2-10-2 | 627_1 | TTcaaacttttaAT |
| 628 | cttcaaacttttaa | 24854 | 24867 | 2-10-2 | 628_1 | CTtcaaacttttAA |
| 629 | acttcaaactttta | 24855 | 24868 | 2-10-2 | 629_1 | ACttcaaactttTA |
| 630 | cacttcaaactttt | 24856 | 24869 | 2-10-2 | 630_1 | CActtcaaacttTT |
| 631 | ccacttcaaacttt | 24857 | 24870 | 2-10-2 | 631_1 | CCacttcaaactTT |
| 632 | cccacttcaaactt | 24858 | 24871 | 2-10-2 | 632_1 | CCcacttcaaacTT |
| 633 | acccacttcaaact | 24859 | 24872 | 2-10-2 | 633_1 | ACccacttcaaaCT |
| 634 | aacccacttcaaac | 24860 | 24873 | 2-10-2 | 634_1 | AAcccacttcaaAC |
| 635 | aaacccacttcaaa | 24861 | 24874 | 2-10-2 | 635_1 | AAacccacttcaAA |
| 636 | aaaacccacttcaa | 24862 | 24875 | 2-10-2 | 636_1 | AAaacccacttcAA |
| 637 | aaaaacccacttca | 24863 | 24876 | 2-10-2 | 637_1 | AAaaacccacttCA |
| 638 | aaaaaacccacttc | 24864 | 24877 | 2-10-2 | 638_1 | AAaaaacccactTC |
| 639 | caaaaaacccactt | 24865 | 24878 | 2-10-2 | 639_1 | CAaaaaacccacTT |
| 640 | acaaaaaacccact | 24866 | 24879 | 2-10-2 | 640_1 | ACaaaaaacccaCT |
| 641 | aacaaaaaacccac | 24867 | 24880 | 2-10-2 | 641_1 | AAcaaaaaacccAC |
| 642 | aaacaaaaaaccca | 24868 | 24881 | 2-10-2 | 642_1 | AAacaaaaaaccCA |
| 643 | aaaacaaaaaaccc | 24869 | 24882 | 2-10-2 | 643_1 | AAaacaaaaaacCC |
| 644 | atcttcccattaat | 24976 | 24989 | 2-10-2 | 644_1 | ATcttcccattaAT |
| 645 | aatcttcccattaa | 24977 | 24990 | 2-10-2 | 645_1 | AAtcttcccattAA |
| 646 | taatcttcccatta | 24978 | 24991 | 2-10-2 | 646_1 | TAatcttcccatTA |
| 647 | ataatcttcccatt | 24979 | 24992 | 2-10-2 | 647_1 | ATaatcttcccaTT |
| 648 | aataatcttcccat | 24980 | 24993 | 2-10-2 | 648_1 | AAtaatcttcccAT |
| 649 | aaataatcttccca | 24981 | 24994 | 2-10-2 | 649_1 | AAataatcttccCA |
| 650 | aaaataatcttccc | 24982 | 24995 | 2-10-2 | 650_1 | AAaataatcttcCC |
| 651 | tattaatcaaaaat | 25057 | 25070 | 2-10-2 | 651_1 | TAttaatcaaaaAT |
| 652 | ctattaatcaaaaa | 25058 | 25071 | 2-10-2 | 652_1 | CTattaatcaaaAA |
| 653 | tctattaatcaaaa | 25059 | 25072 | 2-10-2 | 653_1 | TCtattaatcaaAA |
| 654 | ctctattaatcaaa | 25060 | 25073 | 2-10-2 | 654_1 | CTctattaatcaAA |
| 655 | actctattaatcaa | 25061 | 25074 | 2-10-2 | 655_1 | ACtctattaatcAA |
| 656 | gactctattaatca | 25062 | 25075 | 2-10-2 | 656_1 | GActctattaatCA |
| 657 | tattctactcttct | 25433 | 25446 | 2-10-2 | 657_1 | TAttctactcttCT |
| 658 | atattctactcttc | 25434 | 25447 | 2-10-2 | 658_1 | ATattctactctTC |
| 659 | aatattctactctt | 25435 | 25448 | 2-10-2 | 659_1 | AAtattctactcTT |
| 660 | gaatattctactct | 25436 | 25449 | 2-10-2 | 660_1 | GAatattctactCT |
| 661 | agaatattctactc | 25437 | 25450 | 2-10-2 | 661_1 | AGaatattctacTC |
| 662 | atttaccaattcaa | 25508 | 25521 | 2-10-2 | 662_1 | ATttaccaattcAA |
| 663 | tatttaccaattca | 25509 | 25522 | 2-10-2 | 663_1 | TAtttaccaattCA |
| 664 | gtatttaccaattc | 25510 | 25523 | 2-10-2 | 664_1 | GTatttaccaatTC |
| 665 | tgtatttaccaatt | 25511 | 25524 | 2-10-2 | 665_1 | TGtatttaccaaTT |
| 666 | ctgtatttaccaat | 25512 | 25525 | 2-10-2 | 666_1 | CTgtatttaccaAT |
| 667 | actgtatttaccaa | 25513 | 25526 | 2-10-2 | 667_1 | ACtgtatttaccAA |
| 668 | ttataccatcaaat | 27100 | 27113 | 2-10-2 | 668_1 | TTataccatcaaAT |
| 669 | attataccatcaaa | 27101 | 27114 | 2-10-2 | 669_1 | ATtataccatcaAA |
| 670 | cattataccatcaa | 27102 | 27115 | 2-10-2 | 670_1 | CAttataccatcAA |
| 671 | tcattataccatca | 27103 | 27116 | 2-10-2 | 671_1 | TCattataccatCA |
| 672 | ttcattataccatc | 27104 | 27117 | 2-10-2 | 672_1 | TTcattataccaTC |
| 673 | cttcattataccat | 27105 | 27118 | 2-10-2 | 673_1 | CTtcattataccAT |
| 674 | tcttcattatacca | 27106 | 27119 | 2-10-2 | 674_1 | TCttcattatacCA |
| 675 | ttcttcattatacc | 27107 | 27120 | 2-10-2 | 675_1 | TTcttcattataCC |
| 676 | tttcttcattatac | 27108 | 27121 | 2-10-2 | 676_1 | TTtcttcattatAC |
| 677 | ttttcttcattata | 27109 | 27122 | 2-10-2 | 677_1 | TTttcttcattaTA |
| 678 | attttcttcattat | 27110 | 27123 | 2-10-2 | 678_1 | ATtttcttcattAT |
| 679 | tattttcttcatta | 27111 | 27124 | 2-10-2 | 679_1 | TAttttcttcatTA |
| 680 | atattttcttcatt | 27112 | 27125 | 2-10-2 | 680_1 | ATattttcttcaTT |
| 681 | aatattttcttcat | 27113 | 27126 | 2-10-2 | 681_1 | AAtattttcttcAT |
| 682 | aaatattttcttca | 27114 | 27127 | 2-10-2 | 682_1 | AAatattttcttCA |
| 683 | taaatattttcttc | 27115 | 27128 | 2-10-2 | 683_1 | TAaatattttctTC |
| 684 | aataatccaaactt | 27772 | 27785 | 2-10-2 | 684_1 | AAtaatccaaacTT |
| 685 | aaataatccaaact | 27773 | 27786 | 2-10-2 | 685_1 | AAataatccaaaCT |
| 686 | aaaataatccaaac | 27774 | 27787 | 2-10-2 | 686_1 | AAaataatccaaAC |
| 687 | caaaataatccaaa | 27775 | 27788 | 2-10-2 | 687_1 | CAaaataatccaAA |
| 688 | acaaaataatccaa | 27776 | 27789 | 2-10-2 | 688_1 | ACaaaataatccAA |
| 689 | tacaaaataatcca | 27777 | 27790 | 2-10-2 | 689_1 | TAcaaaataatcCA |
| 690 | ttacaaaataatcc | 27778 | 27791 | 2-10-2 | 690_1 | TTacaaaataatCC |
| 691 | gttacaaaataatc | 27779 | 27792 | 2-10-2 | 691_1 | GTtacaaaataaTC |
| 692 | tgttacaaaataat | 27780 | 27793 | 2-10-2 | 692_1 | TGttacaaaataAT |
| 693 | ttttacattaacta | 27935 | 27948 | 2-10-2 | 693_1 | TTttacattaacTA |
| 694 | tttttacattaact | 27936 | 27949 | 2-10-2 | 694_1 | TTtttacattaaCT |
| 695 | ttttttacattaac | 27937 | 27950 | 2-10-2 | 695_1 | TTttttacattaAC |
| 696 | attttttacattaa | 27938 | 27951 | 2-10-2 | 696_1 | ATtttttacattAA |
| 697 | tattttttacatta | 27939 | 27952 | 2-10-2 | 697_1 | TAttttttacatTA |
| 698 | ttattttttacatt | 27940 | 27953 | 2-10-2 | 698_1 | TTattttttacaTT |
| 699 | aaatactaacatca | 29299 | 29312 | 2-10-2 | 699_1 | AAatactaacatCA |
| 700 | aaaatactaacatc | 29300 | 29313 | 2-10-2 | 700_1 | AAaatactaacaTC |
| 701 | caaaatactaacat | 29301 | 29314 | 2-10-2 | 701_1 | CAaaatactaacAT |
| 702 | ccaaaatactaaca | 29302 | 29315 | 2-10-2 | 702_1 | CCaaaatactaaCA |
| 703 | gccaaaatactaac | 29303 | 29316 | 2-10-2 | 703_1 | GCcaaaatactaAC |
| 704 | tgccaaaatactaa | 29304 | 29317 | 2-10-2 | 704_1 | TGccaaaatactAA |
| 705 | tccattcattttat | 29415 | 29428 | 2-10-2 | 705_1 | TCcattcattttAT |
| 706 | atccattcatttta | 29416 | 29429 | 2-10-2 | 706_1 | ATccattcatttTA |
| 707 | catccattcatttt | 29417 | 29430 | 2-10-2 | 707_1 | CAtccattcattTT |
| 708 | acatccattcattt | 29418 | 29431 | 2-10-2 | 708_1 | ACatccattcatTT |
| 709 | cacatccattcatt | 29419 | 29432 | 2-10-2 | 709_1 | CAcatccattcaTT |
| 710 | ccacatccattcat | 29420 | 29433 | 2-10-2 | 710_1 | CCacatccattcAT |
| 711 | gccacatccattca | 29421 | 29434 | 2-10-2 | 711_1 | GCcacatccattCA |
| 712 | tgccacatccattc | 29422 | 29435 | 2-10-2 | 712_1 | TGccacatccatTC |
| 713 | atgccacatccatt | 29423 | 29436 | 2-10-2 | 713_1 | ATgccacatccaTT |
| 714 | tatgccacatccat | 29424 | 29437 | 2-10-2 | 714_1 | TAtgccacatccAT |
| 715 | ttatgccacatcca | 29425 | 29438 | 2-10-2 | 715_1 | TTatgccacatcCA |
| 716 | attatgccacatcc | 29426 | 29439 | 2-10-2 | 716_1 | ATtatgccacatCC |
| 717 | tcttaactcttctc | 30753 | 30766 | 2-10-2 | 717_1 | TCttaactcttcTC |
| 718 | ttcttaactcttct | 30754 | 30767 | 2-10-2 | 718_1 | TTcttaactcttCT |
| 719 | gttcttaactcttc | 30755 | 30768 | 2-10-2 | 719_1 | GTtcttaactctTC |
| 720 | agttcttaactctt | 30756 | 30769 | 2-10-2 | 720_1 | AGttcttaactcTT |
| 721 | tagttcttaactct | 30757 | 30770 | 2-10-2 | 721_1 | TAgttcttaactCT |
| 722 | caaatactcaaaaa | 31029 | 31042 | 2-10-2 | 722_1 | CAaatactcaaaAA |
| 723 | tcaaatactcaaaa | 31030 | 31043 | 2-10-2 | 723_1 | TCaaatactcaaAA |
| 724 | ttcaaatactcaaa | 31031 | 31044 | 2-10-2 | 724_1 | TTcaaatactcaAA |
| 725 | cttcaaatactcaa | 31032 | 31045 | 2-10-2 | 725_1 | CTtcaaatactcAA |
| 726 | gcttcaaatactca | 31033 | 31046 | 2-10-2 | 726_1 | GCttcaaatactCA |
| 727 | agcttcaaatactc | 31034 | 31047 | 2-10-2 | 727_1 | AGcttcaaatacTC |
| 728 | aagcttcaaatact | 31035 | 31048 | 2-10-2 | 728_1 | AAgcttcaaataCT |
| 729 | cctcattacccatt | 32059 | 32072 | 2-10-2 | 729_1 | CCtcattacccaTT |
| 730 | tcctcattacccat | 32060 | 32073 | 2-10-2 | 730_1 | TCctcattacccAT |
| 731 | atcctcattaccca | 32061 | 32074 | 2-10-2 | 731_1 | ATcctcattaccCA |
| 732 | tatcctcattaccc | 32062 | 32075 | 2-10-2 | 732_1 | TAtcctcattacCC |
| 733 | atatcctcattacc | 32063 | 32076 | 2-10-2 | 733_1 | ATatcctcattaCC |
| 734 | aatatcctcattac | 32064 | 32077 | 2-10-2 | 734_1 | AAtatcctcattAC |
| 735 | taatatcctcatta | 32065 | 32078 | 2-10-2 | 735_1 | TAatatcctcatTA |
| 736 | ttaatatcctcatt | 32066 | 32079 | 2-10-2 | 736_1 | TTaatatcctcaTT |
| 737 | tttaatatcctcat | 32067 | 32080 | 2-10-2 | 737_1 | TTtaatatcctcAT |
| 738 | atttaatatcctca | 32068 | 32081 | 2-10-2 | 738_1 | ATttaatatcctCA |
| 739 | aatttaatatcctc | 32069 | 32082 | 2-10-2 | 739_1 | AAtttaatatccTC |
| 740 | aaatttaatatcct | 32070 | 32083 | 2-10-2 | 740_1 | AAatttaatatcCT |
| 741 | taaatttaatatcc | 32071 | 32084 | 2-10-2 | 741_1 | TAaatttaatatCC |
| 742 | ttaaatttaatatc | 32072 | 32085 | 2-10-2 | 742_1 | TTaaatttaataTC |
| 743 | cttaaatttaatat | 32073 | 32086 | 2-10-2 | 743_1 | CTtaaatttaatAT |
| 744 | tcttaaatttaata | 32074 | 32087 | 2-10-2 | 744_1 | TCttaaatttaaTA |
| 745 | ttcttaaatttaat | 32075 | 32088 | 2-10-2 | 745_1 | TTcttaaatttaAT |
| 746 | gttcttaaatttaa | 32076 | 32089 | 2-10-2 | 746_1 | GTtcttaaatttAA |
| 747 | ttattctactttta | 33431 | 33444 | 2-10-2 | 747_1 | TTattctactttTA |
| 748 | tttattctactttt | 33432 | 33445 | 2-10-2 | 748_1 | TTtattctacttTT |
| 749 | ctttattctacttt | 33433 | 33446 | 2-10-2 | 749_1 | CTttattctactTT |
| 750 | cctttattctactt | 33434 | 33447 | 2-10-2 | 750_1 | CCtttattctacTT |
| 751 | gcctttattctact | 33435 | 33448 | 2-10-2 | 751_1 | GCctttattctaCT |
| 752 | aacaattattaata | 33797 | 33810 | 2-10-2 | 752_1 | AAcaattattaaTA |
| 753 | caacaattattaat | 33798 | 33811 | 2-10-2 | 753_1 | CAacaattattaAT |
| 754 | gcaacaattattaa | 33799 | 33812 | 2-10-2 | 754_1 | GCaacaattattAA |
| 755 | agcaacaattatta | 33800 | 33813 | 2-10-2 | 755_1 | AGcaacaattatTA |
| 756 | cagcaacaattatt | 33801 | 33814 | 2-10-2 | 756_1 | CAgcaacaattaTT |
| 757 | ccagcaacaattat | 33802 | 33815 | 2-10-2 | 757_1 | CCagcaacaattAT |
| 758 | accagcaacaatta | 33803 | 33816 | 2-10-2 | 758_1 | ACcagcaacaatTA |
| 759 | aaaccaaaacttac | 33963 | 33976 | 2-10-2 | 759_1 | AAaccaaaacttAC |
| 760 | aaaaccaaaactta | 33964 | 33977 | 2-10-2 | 760_1 | AAaaccaaaactTA |
| 761 | aaaaaccaaaactt | 33965 | 33978 | 2-10-2 | 761_1 | AAaaaccaaaacTT |
| 762 | caaaaaccaaaact | 33966 | 33979 | 2-10-2 | 762_1 | CAaaaaccaaaaCT |
| 763 | ccaaaaaccaaaac | 33967 | 33980 | 2-10-2 | 763_1 | CCaaaaaccaaaAC |
| 764 | accaaaaaccaaaa | 33968 | 33981 | 2-10-2 | 764_1 | ACcaaaaaccaaAA |
| 765 | aaccaaaaaccaaa | 33969 | 33982 | 2-10-2 | 765_1 | AAccaaaaaccaAA |
| 766 | aaaccaaaaaccaa | 33970 | 33983 | 2-10-2 | 766_1 | AAaccaaaaaccAA |
| 767 | atctaaaacacttc | 34050 | 34063 | 2-10-2 | 767_1 | ATctaaaacactTC |
| 768 | aatctaaaacactt | 34051 | 34064 | 2-10-2 | 768_1 | AAtctaaaacacTT |
| 769 | aaatctaaaacact | 34052 | 34065 | 2-10-2 | 769_1 | AAatctaaaacaCT |
| 770 | caaatctaaaacac | 34053 | 34066 | 2-10-2 | 770_1 | CAaatctaaaacAC |
| 771 | ccaaatctaaaaca | 34054 | 34067 | 2-10-2 | 771_1 | CCaaatctaaaaCA |
| 772 | cccaaatctaaaac | 34055 | 34068 | 2-10-2 | 772_1 | CCcaaatctaaaAC |
| 773 | ccccaaatctaaaa | 34056 | 34069 | 2-10-2 | 773_1 | CCccaaatctaaAA |
| 774 | accccaaatctaaa | 34057 | 34070 | 2-10-2 | 774_1 | ACcccaaatctaAA |
| 775 | aaccccaaatctaa | 34058 | 34071 | 2-10-2 | 775_1 | AAccccaaatctAA |
| 776 | aaaccccaaatcta | 34059 | 34072 | 2-10-2 | 776_1 | AAaccccaaatcTA |
| 777 | attcacaaatccta | 34075 | 34088 | 2-10-2 | 777_1 | ATtcacaaatccTA |
| 778 | tattcacaaatcct | 34076 | 34089 | 2-10-2 | 778_1 | TAttcacaaatcCT |
| 779 | atattcacaaatcc | 34077 | 34090 | 2-10-2 | 779_1 | ATattcacaaatCC |
| 780 | aatattcacaaatc | 34078 | 34091 | 2-10-2 | 780_1 | AAtattcacaaaTC |
| 781 | aaatattcacaaat | 34079 | 34092 | 2-10-2 | 781_1 | AAatattcacaaAT |
| 782 | caaatattcacaaa | 34080 | 34093 | 2-10-2 | 782_1 | CAaatattcacaAA |
| 783 | gcaaatattcacaa | 34081 | 34094 | 2-10-2 | 783_1 | GCaaatattcacAA |
| 784 | aacacacattatca | 34537 | 34550 | 2-10-2 | 784_1 | AAcacacattatCA |
| 785 | taacacacattatc | 34538 | 34551 | 2-10-2 | 785_1 | TAacacacattaTC |
| 786 | ttaacacacattat | 34539 | 34552 | 2-10-2 | 786_1 | TTaacacacattAT |
| 787 | tttaacacacatta | 34540 | 34553 | 2-10-2 | 787_1 | TTtaacacacatTA |
| 788 | atttaacacacatt | 34541 | 34554 | 2-10-2 | 788_1 | ATttaacacacaTT |
| 789 | tatttaacacacat | 34542 | 34555 | 2-10-2 | 789_1 | TAtttaacacacAT |
| 790 | ctatttaacacaca | 34543 | 34556 | 2-10-2 | 790_1 | CTatttaacacaCA |
| 791 | actatttaacacac | 34544 | 34557 | 2-10-2 | 791_1 | ACtatttaacacAC |
| 792 | tactatttaacaca | 34545 | 34558 | 2-10-2 | 792_1 | TActatttaacaCA |
| 793 | ctactatttaacac | 34546 | 34559 | 2-10-2 | 793_1 | CTactatttaacAC |
| 794 | actactatttaaca | 34547 | 34560 | 2-10-2 | 794_1 | ACtactatttaaCA |
| 795 | aactactatttaac | 34548 | 34561 | 2-10-2 | 795_1 | AActactatttaAC |
| 796 | aaactactatttaa | 34549 | 34562 | 2-10-2 | 796_1 | AAactactatttAA |
| 797 | aaaactactattta | 34550 | 34563 | 2-10-2 | 797_1 | AAaactactattTA |
| 798 | gaaaactactattt | 34551 | 34564 | 2-10-2 | 798_1 | GAaaactactatTT |
| 799 | tgaaaactactatt | 34552 | 34565 | 2-10-2 | 799_1 | TGaaaactactaTT |
| 800 | aaataacctatcat | 35309 | 35322 | 2-10-2 | 800_1 | AAataacctatcAT |
| 801 | aaaataacctatca | 35310 | 35323 | 2-10-2 | 801_1 | AAaataacctatCA |
| 802 | caaaataacctatc | 35311 | 35324 | 2-10-2 | 802_1 | CAaaataacctaTC |
| 803 | acaaaataacctat | 35312 | 35325 | 2-10-2 | 803_1 | ACaaaataacctAT |
| 804 | cacaaaataaccta | 35313 | 35326 | 2-10-2 | 804_1 | CAcaaaataaccTA |
| 805 | tcacaaaataacct | 35314 | 35327 | 2-10-2 | 805_1 | TCacaaaataacCT |
| 806 | atcacaaaataacc | 35315 | 35328 | 2-10-2 | 806_1 | ATcacaaaataaCC |
| 807 | catcacaaaataac | 35316 | 35329 | 2-10-2 | 807_1 | CAtcacaaaataAC |
| 808 | tcatcacaaaataa | 35317 | 35330 | 2-10-2 | 808_1 | TCatcacaaaatAA |
| 809 | ttcatcacaaaata | 35318 | 35331 | 2-10-2 | 809_1 | TTcatcacaaaaTA |
| 810 | tttcatcacaaaat | 35319 | 35332 | 2-10-2 | 810_1 | TTtcatcacaaaAT |
| 811 | ttttcatcacaaaa | 35320 | 35333 | 2-10-2 | 811_1 | TTttcatcacaaAA |
| 812 | attttcatcacaaa | 35321 | 35334 | 2-10-2 | 812_1 | ATtttcatcacaAA |
| 813 | tattttcatcacaa | 35322 | 35335 | 2-10-2 | 813_1 | TAttttcatcacAA |
| 814 | gtattttcatcaca | 35323 | 35336 | 2-10-2 | 814_1 | GTattttcatcaCA |
| 815 | atttaaatttatca | 35354 | 35367 | 2-10-2 | 815_1 | ATttaaatttatCA |
| 816 | aatttaaatttatc | 35355 | 35368 | 2-10-2 | 816_1 | AAtttaaatttaTC |
| 817 | aaatttaaatttat | 35356 | 35369 | 2-10-2 | 817_1 | AAatttaaatttAT |
| 818 | aaaatttaaattta | 35357 | 35370 | 2-10-2 | 818_1 | AAaatttaaattTA |
| 819 | taaaatttaaattt | 35358 | 35371 | 2-10-2 | 819_1 | TAaaatttaaatTT |
| 820 | ataaaatttaaatt | 35359 | 35372 | 2-10-2 | 820_1 | ATaaaatttaaaTT |
| 821 | cataaaatttaaat | 35360 | 35373 | 2-10-2 | 821_1 | CAtaaaatttaaAT |
| 822 | acataaaatttaaa | 35361 | 35374 | 2-10-2 | 822_1 | ACataaaatttaAA |
| 823 | ctactaatattcat | 36332 | 36345 | 2-10-2 | 823_1 | CTactaatattcAT |
| 824 | cctactaatattca | 36333 | 36346 | 2-10-2 | 824_1 | CCtactaatattCA |
| 825 | acctactaatattc | 36334 | 36347 | 2-10-2 | 825_1 | ACctactaatatTC |
| 826 | cacctactaatatt | 36335 | 36348 | 2-10-2 | 826_1 | CAcctactaataTT |
| 827 | tcacctactaatat | 36336 | 36349 | 2-10-2 | 827_1 | TCacctactaatAT |
| 828 | ttcacctactaata | 36337 | 36350 | 2-10-2 | 828_1 | TTcacctactaaTA |
| 829 | tttcacctactaat | 36338 | 36351 | 2-10-2 | 829_1 | TTtcacctactaAT |
| 830 | ttttcacctactaa | 36339 | 36352 | 2-10-2 | 830_1 | TTttcacctactAA |
| 831 | tttttcacctacta | 36340 | 36353 | 2-10-2 | 831_1 | TTtttcacctacTA |
| 832 | atttttcacctact | 36341 | 36354 | 2-10-2 | 832_1 | ATttttcacctaCT |
| 833 | tatttttcacctac | 36342 | 36355 | 2-10-2 | 833_1 | TAtttttcacctAC |
| 834 | ttatttttcaccta | 36343 | 36356 | 2-10-2 | 834_1 | TTatttttcaccTA |
| 835 | tttatttttcacct | 36344 | 36357 | 2-10-2 | 835_1 | TTtatttttcacCT |
| 836 | ttctactactaatt | 36468 | 36481 | 2-10-2 | 836_1 | TTctactactaaTT |
| 837 | cttctactactaat | 36469 | 36482 | 2-10-2 | 837_1 | CTtctactactaAT |
| 838 | acttctactactaa | 36470 | 36483 | 2-10-2 | 838_1 | ACttctactactAA |
| 839 | aacttctactacta | 36471 | 36484 | 2-10-2 | 839_1 | AActtctactacTA |
| 840 | caacttctactact | 36472 | 36485 | 2-10-2 | 840_1 | CAacttctactaCT |
| 841 | tcaacttctactac | 36473 | 36486 | 2-10-2 | 841_1 | TCaacttctactAC |
| 842 | ctcaacttctacta | 36474 | 36487 | 2-10-2 | 842_1 | CTcaacttctacTA |
| 843 | tctcaacttctact | 36475 | 36488 | 2-10-2 | 843_1 | TCtcaacttctaCT |
| 844 | ctctcaacttctac | 36476 | 36489 | 2-10-2 | 844_1 | CTctcaacttctAC |
| 845 | tctctcaacttcta | 36477 | 36490 | 2-10-2 | 845_1 | TCtctcaacttcTA |
| 846 | ttctctcaacttct | 36478 | 36491 | 2-10-2 | 846_1 | TTctctcaacttCT |
| 847 | tttctctcaacttc | 36479 | 36492 | 2-10-2 | 847_1 | TTtctctcaactTC |
| 848 | ttttctctcaactt | 36480 | 36493 | 2-10-2 | 848_1 | TTttctctcaacTT |
| 849 | tttttctctcaact | 36481 | 36494 | 2-10-2 | 849_1 | TTtttctctcaaCT |
| 850 | ctttttctctcaac | 36482 | 36495 | 2-10-2 | 850_1 | CTttttctctcaAC |
| 851 | actttttctctcaa | 36483 | 36496 | 2-10-2 | 851_1 | ACtttttctctcAA |
| 852 | tactttttctctca | 36484 | 36497 | 2-10-2 | 852_1 | TActttttctctCA |
| 853 | ttactttttctctc | 36485 | 36498 | 2-10-2 | 853_1 | TTactttttctcTC |
| 854 | gttactttttctct | 36486 | 36499 | 2-10-2 | 854_1 | GTtactttttctCT |
| 855 | agttactttttctc | 36487 | 36500 | 2-10-2 | 855_1 | AGttactttttcTC |
| 856 | cattcccattaaca | 36788 | 36801 | 2-10-2 | 856_1 | CAttcccattaaCA |
| 857 | acattcccattaac | 36789 | 36802 | 2-10-2 | 857_1 | ACattcccattaAC |
| 858 | tacattcccattaa | 36790 | 36803 | 2-10-2 | 858_1 | TAcattcccattAA |
| 859 | ttacattcccatta | 36791 | 36804 | 2-10-2 | 859_1 | TTacattcccatTA |
| 860 | tttacattcccatt | 36792 | 36805 | 2-10-2 | 860_1 | TTtacattcccaTT |
| 861 | ttttacattcccat | 36793 | 36806 | 2-10-2 | 861_1 | TTttacattcccAT |
| 862 | cttttacattccca | 36794 | 36807 | 2-10-2 | 862_1 | CTtttacattccCA |
| 863 | acttttacattccc | 36795 | 36808 | 2-10-2 | 863_1 | ACttttacattcCC |
| 864 | cacttttacattcc | 36796 | 36809 | 2-10-2 | 864_1 | CActtttacattCC |
| 865 | acacttttacattc | 36797 | 36810 | 2-10-2 | 865_1 | ACacttttacatTC |
| 866 | tacacttttacatt | 36798 | 36811 | 2-10-2 | 866_1 | TAcacttttacaTT |
| 867 | gtacacttttacat | 36799 | 36812 | 2-10-2 | 867_1 | GTacacttttacAT |
| 868 | tgtacacttttaca | 36800 | 36813 | 2-10-2 | 868_1 | TGtacacttttaCA |
| 869 | tttatcaaaaaaat | 36834 | 36847 | 2-10-2 | 869_1 | TTtatcaaaaaaAT |
| 870 | atttatcaaaaaaa | 36835 | 36848 | 2-10-2 | 870_1 | ATttatcaaaaaAA |
| 871 | catttatcaaaaaa | 36836 | 36849 | 2-10-2 | 871_1 | CAtttatcaaaaAA |
| 872 | acatttatcaaaaa | 36837 | 36850 | 2-10-2 | 872_1 | ACatttatcaaaAA |
| 873 | tacatttatcaaaa | 36838 | 36851 | 2-10-2 | 873_1 | TAcatttatcaaAA |
| 874 | atacatttatcaaa | 36839 | 36852 | 2-10-2 | 874_1 | ATacatttatcaAA |
| 875 | tatacatttatcaa | 36840 | 36853 | 2-10-2 | 875_1 | TAtacatttatcAA |
| 876 | acatcttccaattt | 38848 | 38861 | 2-10-2 | 876_1 | ACatcttccaatTT |
| 877 | tacatcttccaatt | 38849 | 38862 | 2-10-2 | 877_1 | TAcatcttccaaTT |
| 878 | ttacatcttccaat | 38850 | 38863 | 2-10-2 | 878_1 | TTacatcttccaAT |
| 879 | tttacatcttccaa | 38851 | 38864 | 2-10-2 | 879_1 | TTtacatcttccAA |
| 880 | atttacatcttcca | 38852 | 38865 | 2-10-2 | 880_1 | ATttacatcttcCA |
| 881 | tatttacatcttcc | 38853 | 38866 | 2-10-2 | 881_1 | TAtttacatcttCC |
| 882 | ttatttacatcttc | 38854 | 38867 | 2-10-2 | 882_1 | TTatttacatctTC |
| 883 | cttatttacatctt | 38855 | 38868 | 2-10-2 | 883_1 | CTtatttacatcTT |
| 884 | tcttatttacatct | 38856 | 38869 | 2-10-2 | 884_1 | TCttatttacatCT |
| 885 | atcttatttacatc | 38857 | 38870 | 2-10-2 | 885_1 | ATcttatttacaTC |
| 886 | aatcttatttacat | 38858 | 38871 | 2-10-2 | 886_1 | AAtcttatttacAT |
| 887 | gaatcttatttaca | 38859 | 38872 | 2-10-2 | 887_1 | GAatcttatttaCA |
| 888 | tgaatcttatttac | 38860 | 38873 | 2-10-2 | 888_1 | TGaatcttatttAC |
| 889 | ttcccttcactcct | 40071 | 40084 | 2-10-2 | 889_1 | TTcccttcactcCT |
| 890 | tttcccttcactcc | 40072 | 40085 | 2-10-2 | 890_1 | TTtcccttcactCC |
| 891 | ttttcccttcactc | 40073 | 40086 | 2-10-2 | 891_1 | TTttcccttcacTC |
| 892 | attttcccttcact | 40074 | 40087 | 2-10-2 | 892_1 | ATtttcccttcaCT |
| 893 | aattttcccttcac | 40075 | 40088 | 2-10-2 | 893_1 | AAttttcccttcAC |
| 894 | taattttcccttca | 40076 | 40089 | 2-10-2 | 894_1 | TAattttcccttCA |
| 895 | ttaattttcccttc | 40077 | 40090 | 2-10-2 | 895_1 | TTaattttccctTC |
| 896 | gttaattttccctt | 40078 | 40091 | 2-10-2 | 896_1 | GTtaattttcccTT |
| 897 | tttatcatttcttt | 40150 | 40163 | 2-10-2 | 897_1 | TTtatcatttctTT |
| 898 | ttttatcatttctt | 40151 | 40164 | 2-10-2 | 898_1 | TTttatcatttcTT |
| 899 | cttttatcatttct | 40152 | 40165 | 2-10-2 | 899_1 | CTtttatcatttCT |
| 900 | tcttttatcatttc | 40153 | 40166 | 2-10-2 | 900_1 | TCttttatcattTC |
| 901 | ttcttttatcattt | 40154 | 40167 | 2-10-2 | 901_1 | TTcttttatcatTT |
| 902 | cttcttttatcatt | 40155 | 40168 | 2-10-2 | 902_1 | CTtcttttatcaTT |
| 903 | acttcttttatcat | 40156 | 40169 | 2-10-2 | 903_1 | ACttcttttatcAT |
| 904 | tacttcttttatca | 40157 | 40170 | 2-10-2 | 904_1 | TActtcttttatCA |
| 905 | ttacttcttttatc | 40158 | 40171 | 2-10-2 | 905_1 | TTacttcttttaTC |
| 906 | attacttcttttat | 40159 | 40172 | 2-10-2 | 906_1 | ATtacttcttttAT |
| 907 | aattacttctttta | 40160 | 40173 | 2-10-2 | 907_1 | AAttacttctttTA |
| 908 | aaattacttctttt | 40161 | 40174 | 2-10-2 | 908_1 | AAattacttcttTT |
| 909 | aaaattacttcttt | 40162 | 40175 | 2-10-2 | 909_1 | AAaattacttctTT |
| 910 | caaaattacttctt | 40163 | 40176 | 2-10-2 | 910_1 | CAaaattacttcTT |
| 911 | ccaaaattacttct | 40164 | 40177 | 2-10-2 | 911_1 | CCaaaattacttCT |
| 912 | tccaaaattacttc | 40165 | 40178 | 2-10-2 | 912_1 | TCcaaaattactTC |
| 913 | ttccaaaattactt | 40166 | 40179 | 2-10-2 | 913_1 | TTccaaaattacTT |
| 914 | gttccaaaattact | 40167 | 40180 | 2-10-2 | 914_1 | GTtccaaaattaCT |
| 915 | tgttccaaaattac | 40168 | 40181 | 2-10-2 | 915_1 | TGttccaaaattAC |
| 916 | atgttccaaaatta | 40169 | 40182 | 2-10-2 | 916_1 | ATgttccaaaatTA |
| 917 | ttactctttttatt | 40201 | 40214 | 2-10-2 | 917_1 | TTactctttttaTT |
| 918 | tttactctttttat | 40202 | 40215 | 2-10-2 | 918_1 | TTtactctttttAT |
| 919 | ttttactcttttta | 40203 | 40216 | 2-10-2 | 919_1 | TTttactcttttTA |
| 920 | attttactcttttt | 40204 | 40217 | 2-10-2 | 920_1 | ATtttactctttTT |
| 921 | tattttactctttt | 40205 | 40218 | 2-10-2 | 921_1 | TAttttactcttTT |
| 922 | atattttactcttt | 40206 | 40219 | 2-10-2 | 922_1 | ATattttactctTT |
| 923 | catattttactctt | 40207 | 40220 | 2-10-2 | 923_1 | CAtattttactcTT |
| 924 | ccatattttactct | 40208 | 40221 | 2-10-2 | 924_1 | CCatattttactCT |
| 925 | cccatattttactc | 40209 | 40222 | 2-10-2 | 925_1 | CCcatattttacTC |
| 926 | acccatattttact | 40210 | 40223 | 2-10-2 | 926_1 | ACccatattttaCT |
| 927 | tacccatattttac | 40211 | 40224 | 2-10-2 | 927_1 | TAcccatattttAC |
| 928 | ttacccatatttta | 40212 | 40225 | 2-10-2 | 928_1 | TTacccatatttTA |
| 929 | tttacccatatttt | 40213 | 40226 | 2-10-2 | 929_1 | TTtacccatattTT |
| 930 | gtttacccatattt | 40214 | 40227 | 2-10-2 | 930_1 | GTttacccatatTT |
| 931 | tgtttacccatatt | 40215 | 40228 | 2-10-2 | 931_1 | TGtttacccataTT |
| 932 | gttacctcccttta | 40368 | 40381 | 2-10-2 | 932_1 | GTtacctcccttTA |
| 933 | ggttacctcccttt | 40369 | 40382 | 2-10-2 | 933_1 | GGttacctccctTT |
| 934 | aggttacctccctt | 40370 | 40383 | 2-10-2 | 934_1 | AGgttacctcccTT |
| 935 | caaactaaaaccta | 41659 | 41672 | 2-10-2 | 935_1 | CAaactaaaaccTA |
| 936 | tcaaactaaaacct | 41660 | 41673 | 2-10-2 | 936_1 | TCaaactaaaacCT |
| 937 | atcaaactaaaacc | 41661 | 41674 | 2-10-2 | 937_1 | ATcaaactaaaaCC |
| 938 | gatcaaactaaaac | 41662 | 41675 | 2-10-2 | 938_1 | GAtcaaactaaaAC |
| 939 | agatcaaactaaaa | 41663 | 41676 | 2-10-2 | 939_1 | AGatcaaactaaAA |
| 940 | aagatcaaactaaa | 41664 | 41677 | 2-10-2 | 940_1 | AAgatcaaactaAA |
| 941 | ccaatttcacccaa | 41699 | 41712 | 2-10-2 | 941_1 | CCaatttcacccAA |
| 942 | cccaatttcaccca | 41700 | 41713 | 2-10-2 | 942_1 | CCcaatttcaccCA |
| 943 | gcccaatttcaccc | 41701 | 41714 | 2-10-2 | 943_1 | GCccaatttcacCC |
| 944 | tgcccaatttcacc | 41702 | 41715 | 2-10-2 | 944_1 | TGcccaatttcaCC |
| 945 | ttgcccaatttcac | 41703 | 41716 | 2-10-2 | 945_1 | TTgcccaatttcAC |
| 946 | caactttctatttt | 41777 | 41790 | 2-10-2 | 946_1 | CAactttctattTT |
| 947 | ccaactttctattt | 41778 | 41791 | 2-10-2 | 947_1 | CCaactttctatTT |
| 948 | cccaactttctatt | 41779 | 41792 | 2-10-2 | 948_1 | CCcaactttctaTT |
| 949 | acccaactttctat | 41780 | 41793 | 2-10-2 | 949_1 | ACccaactttctAT |
| 950 | aacccaactttcta | 41781 | 41794 | 2-10-2 | 950_1 | AAcccaactttcTA |
| 951 | aaacccaactttct | 41782 | 41795 | 2-10-2 | 951_1 | AAacccaactttCT |
| 952 | aaaacccaactttc | 41783 | 41796 | 2-10-2 | 952_1 | AAaacccaacttTC |
| 953 | aaaaacccaacttt | 41784 | 41797 | 2-10-2 | 953_1 | AAaaacccaactTT |
| 954 | caaaaacccaactt | 41785 | 41798 | 2-10-2 | 954_1 | CAaaaacccaacTT |
| 955 | acaaaaacccaact | 41786 | 41799 | 2-10-2 | 955_1 | ACaaaaacccaaCT |
| 956 | ctttaaaatttcca | 42170 | 42183 | 2-10-2 | 956_1 | CTttaaaatttcCA |
| 957 | tctttaaaatttcc | 42171 | 42184 | 2-10-2 | 957_1 | TCtttaaaatttCC |
| 958 | ttctttaaaatttc | 42172 | 42185 | 2-10-2 | 958_1 | TTctttaaaattTC |
| 959 | tttctttaaaattt | 42173 | 42186 | 2-10-2 | 959_1 | TTtctttaaaatTT |
| 960 | atttctttaaaatt | 42174 | 42187 | 2-10-2 | 960_1 | ATttctttaaaaTT |
| 961 | catttctttaaaat | 42175 | 42188 | 2-10-2 | 961_1 | CAtttctttaaaAT |
| 962 | acatttctttaaaa | 42176 | 42189 | 2-10-2 | 962_1 | ACatttctttaaAA |
| 963 | cacatttctttaaa | 42177 | 42190 | 2-10-2 | 963_1 | CAcatttctttaAA |
| 964 | ccacatttctttaa | 42178 | 42191 | 2-10-2 | 964_1 | CCacatttctttAA |
| 965 | accacatttcttta | 42179 | 42192 | 2-10-2 | 965_1 | ACcacatttcttTA |
| 966 | aaccacatttcttt | 42180 | 42193 | 2-10-2 | 966_1 | AAccacatttctTT |
| 967 | aaaccacatttctt | 42181 | 42194 | 2-10-2 | 967_1 | AAaccacatttcTT |
| 968 | aaaaccacatttct | 42182 | 42195 | 2-10-2 | 968_1 | AAaaccacatttCT |
| 969 | caaaaccacatttc | 42183 | 42196 | 2-10-2 | 969_1 | CAaaaccacattTC |
| 970 | ttcttctcttttca | 43831 | 43844 | 2-10-2 | 970_1 | TTcttctcttttCA |
| 971 | tttcttctcttttc | 43832 | 43845 | 2-10-2 | 971_1 | TTtcttctctttTC |
| 972 | ttttcttctctttt | 43833 | 43846 | 2-10-2 | 972_1 | TTttcttctcttTT |
| 973 | tttttcttctcttt | 43834 | 43847 | 2-10-2 | 973_1 | TTtttcttctctTT |
| 974 | ttttttcttctctt | 43835 | 43848 | 2-10-2 | 974_1 | TTttttcttctcTT |
| 975 | attttttcttctct | 43836 | 43849 | 2-10-2 | 975_1 | ATtttttcttctCT |
| 976 | tattttttcttctc | 43837 | 43850 | 2-10-2 | 976_1 | TAttttttcttcTC |
| 977 | aacttaatattaaa | 45488 | 45501 | 2-10-2 | 977_1 | AActtaatattaAA |
| 978 | caacttaatattaa | 45489 | 45502 | 2-10-2 | 978_1 | CAacttaatattAA |
| 979 | tcaacttaatatta | 45490 | 45503 | 2-10-2 | 979_1 | TCaacttaatatTA |
| 980 | ttcaacttaatatt | 45491 | 45504 | 2-10-2 | 980_1 | TTcaacttaataTT |
| 981 | attcaacttaatat | 45492 | 45505 | 2-10-2 | 981_1 | ATtcaacttaatAT |
| 982 | tattcaacttaata | 45493 | 45506 | 2-10-2 | 982_1 | TAttcaacttaaTA |
| 983 | ttattcaacttaat | 45494 | 45507 | 2-10-2 | 983_1 | TTattcaacttaAT |
| 984 | tttattcaacttaa | 45495 | 45508 | 2-10-2 | 984_1 | TTtattcaacttAA |
| 985 | caaattaaaaaaca | 47397 | 47410 | 2-10-2 | 985_1 | CAaattaaaaaaCA |
| 986 | tcaaattaaaaaac | 47398 | 47411 | 2-10-2 | 986_1 | TCaaattaaaaaAC |
| 987 | ttcaaattaaaaaa | 47399 | 47412 | 2-10-2 | 987_1 | TTcaaattaaaaAA |
| 988 | cttcaaattaaaaa | 47400 | 47413 | 2-10-2 | 988_1 | CTtcaaattaaaAA |
| 989 | tcttcaaattaaaa | 47401 | 47414 | 2-10-2 | 989_1 | TCttcaaattaaAA |
| 990 | ttcttcaaattaaa | 47402 | 47415 | 2-10-2 | 990_1 | TTcttcaaattaAA |
| 991 | tttcttcaaattaa | 47403 | 47416 | 2-10-2 | 991_1 | TTtcttcaaattAA |
| 992 | aacacaaattcaaa | 48077 | 48090 | 2-10-2 | 992_1 | AAcacaaattcaAA |
| 993 | aaacacaaattcaa | 48078 | 48091 | 2-10-2 | 993_1 | AAacacaaattcAA |
| 994 | taaacacaaattca | 48079 | 48092 | 2-10-2 | 994_1 | TAaacacaaattCA |
| 995 | ataaacacaaattc | 48080 | 48093 | 2-10-2 | 995_1 | ATaaacacaaatTC |
| 996 | aataaacacaaatt | 48081 | 48094 | 2-10-2 | 996_1 | AAtaaacacaaaTT |
| 997 | caataaacacaaat | 48082 | 48095 | 2-10-2 | 997_1 | CAataaacacaaAT |
| 998 | acaataaacacaaa | 48083 | 48096 | 2-10-2 | 998_1 | ACaataaacacaAA |
| 999 | aacaataaacacaa | 48084 | 48097 | 2-10-2 | 999_1 | AAcaataaacacAA |
| 1000 | taacaataaacaca | 48085 | 48098 | 2-10-2 | 1000_1 | TAacaataaacaCA |
| 1001 | ttaacaataaacac | 48086 | 48099 | 2-10-2 | 1001_1 | TTaacaataaacAC |
| 1002 | attaacaataaaca | 48087 | 48100 | 2-10-2 | 1002_1 | ATtaacaataaaCA |
| 1003 | aattaacaataaac | 48088 | 48101 | 2-10-2 | 1003_1 | AAttaacaataaAC |
| 1004 | gaattaacaataaa | 48089 | 48102 | 2-10-2 | 1004_1 | GAattaacaataAA |
| 1005 | tgaattaacaataa | 48090 | 48103 | 2-10-2 | 1005_1 | TGaattaacaatAA |
| 1006 | atattcctcaatca | 48905 | 48918 | 2-10-2 | 1006_1 | ATattcctcaatCA |
| 1007 | tatattcctcaatc | 48906 | 48919 | 2-10-2 | 1007_1 | TAtattcctcaaTC |
| 1008 | atatattcctcaat | 48907 | 48920 | 2-10-2 | 1008_1 | ATatattcctcaAT |
| 1009 | aatatattcctcaa | 48908 | 48921 | 2-10-2 | 1009_1 | AAtatattcctcAA |
| 1010 | caatatattcctca | 48909 | 48922 | 2-10-2 | 1010_1 | CAatatattcctCA |
| 1011 | acaatatattcctc | 48910 | 48923 | 2-10-2 | 1011_1 | ACaatatattccTC |
| 1012 | gacaatatattcct | 48911 | 48924 | 2-10-2 | 1012_1 | GAcaatatattcCT |
| 1013 | caatcctaattaaa | 48960 | 48973 | 2-10-2 | 1013_1 | CAatcctaattaAA |
| 1014 | ccaatcctaattaa | 48961 | 48974 | 2-10-2 | 1014_1 | CCaatcctaattAA |
| 1015 | cccaatcctaatta | 48962 | 48975 | 2-10-2 | 1015_1 | CCcaatcctaatTA |
| 1016 | gcccaatcctaatt | 48963 | 48976 | 2-10-2 | 1016_1 | GCccaatcctaaTT |
| 1017 | tgcccaatcctaat | 48964 | 48977 | 2-10-2 | 1017_1 | TGcccaatcctaAT |
| 1018 | accctacaaatact | 50093 | 50106 | 2-10-2 | 1018_1 | ACcctacaaataCT |
| 1019 | aaccctacaaatac | 50094 | 50107 | 2-10-2 | 1019_1 | AAccctacaaatAC |
| 1020 | aaaccctacaaata | 50095 | 50108 | 2-10-2 | 1020_1 | AAaccctacaaaTA |
| 1021 | aaaaccctacaaat | 50096 | 50109 | 2-10-2 | 1021_1 | AAaaccctacaaAT |
| 1022 | aaaaaccctacaaa | 50097 | 50110 | 2-10-2 | 1022_1 | AAaaaccctacaAA |
| 1023 | aaaaaaccctacaa | 50098 | 50111 | 2-10-2 | 1023_1 | AAaaaaccctacAA |
| 1024 | aaaaaaaccctaca | 50099 | 50112 | 2-10-2 | 1024_1 | AAaaaaaccctaCA |
| 1025 | tatacactattaat | 51008 | 51021 | 2-10-2 | 1025_1 | TAtacactattaAT |
| 1026 | ttatacactattaa | 51009 | 51022 | 2-10-2 | 1026_1 | TTatacactattAA |
| 1027 | attatacactatta | 51010 | 51023 | 2-10-2 | 1027_1 | ATtatacactatTA |
| 1028 | aattatacactatt | 51011 | 51024 | 2-10-2 | 1028_1 | AAttatacactaTT |
| 1029 | gaattatacactat | 51012 | 51025 | 2-10-2 | 1029_1 | GAattatacactAT |
| 1030 | gtaacaattataca | 51866 | 51879 | 2-10-2 | 1030_1 | GTaacaattataCA |
| 1031 | tgtaacaattatac | 51867 | 51880 | 2-10-2 | 1031_1 | TGtaacaattatAC |
| 1032 | ctgtaacaattata | 51868 | 51881 | 2-10-2 | 1032_1 | CTgtaacaattaTA |
| 1033 | cctgtaacaattat | 51869 | 51882 | 2-10-2 | 1033_1 | CCtgtaacaattAT |
| 1034 | tcctgtaacaatta | 51870 | 51883 | 2-10-2 | 1034_1 | TCctgtaacaatTA |
| 1035 | ataaaaaccacctt | 53263 | 53276 | 2-10-2 | 1035_1 | ATaaaaaccaccTT |
| 1036 | aataaaaaccacct | 53264 | 53277 | 2-10-2 | 1036_1 | AAtaaaaaccacCT |
| 1037 | gaataaaaaccacc | 53265 | 53278 | 2-10-2 | 1037_1 | GAataaaaaccaCC |
| 1038 | agaataaaaaccac | 53266 | 53279 | 2-10-2 | 1038_1 | AGaataaaaaccAC |
| 1039 | cagaataaaaacca | 53267 | 53280 | 2-10-2 | 1039_1 | CAgaataaaaacCA |
| 1040 | ccagaataaaaacc | 53268 | 53281 | 2-10-2 | 1040_1 | CCagaataaaaaCC |
| 1041 | cccagaataaaaac | 53269 | 53282 | 2-10-2 | 1041_1 | CCcagaataaaaAC |
| 1042 | acccagaataaaaa | 53270 | 53283 | 2-10-2 | 1042_1 | ACccagaataaaAA |
| 1043 | tttcttactcccct | 53699 | 53712 | 2-10-2 | 1043_1 | TTtcttactcccCT |
| 1044 | ctttcttactcccc | 53700 | 53713 | 2-10-2 | 1044_1 | CTttcttactccCC |
| 1045 | actttcttactccc | 53701 | 53714 | 2-10-2 | 1045_1 | ACtttcttactcCC |
| 1046 | cactttcttactcc | 53702 | 53715 | 2-10-2 | 1046_1 | CActttcttactCC |
| 1047 | ccactttcttactc | 53703 | 53716 | 2-10-2 | 1047_1 | CCactttcttacTC |
| 1048 | cctttaccactttt | 53948 | 53961 | 2-10-2 | 1048_1 | CCtttaccacttTT |
| 1049 | ccctttaccacttt | 53949 | 53962 | 2-10-2 | 1049_1 | CCctttaccactTT |
| 1050 | tccctttaccactt | 53950 | 53963 | 2-10-2 | 1050_1 | TCcctttaccacTT |
| 1051 | atccctttaccact | 53951 | 53964 | 2-10-2 | 1051_1 | ATccctttaccaCT |
| 1052 | catccctttaccac | 53952 | 53965 | 2-10-2 | 1052_1 | CAtccctttaccAC |
| 1053 | ctacatctaacccc | 54550 | 54563 | 2-10-2 | 1053_1 | CTacatctaaccCC |
| 1054 | tctacatctaaccc | 54551 | 54564 | 2-10-2 | 1054_1 | TCtacatctaacCC |
| 1055 | gtctacatctaacc | 54552 | 54565 | 2-10-2 | 1055_1 | GTctacatctaaCC |
| 1056 | agtctacatctaac | 54553 | 54566 | 2-10-2 | 1056_1 | AGtctacatctaAC |
| 1057 | cagtctacatctaa | 54554 | 54567 | 2-10-2 | 1057_1 | CAgtctacatctAA |
| 1058 | tcagtctacatcta | 54555 | 54568 | 2-10-2 | 1058_1 | TCagtctacatcTA |
| 1059 | ttcagtctacatct | 54556 | 54569 | 2-10-2 | 1059_1 | TTcagtctacatCT |
| 1060 | taaccacacctcct | 54573 | 54586 | 2-10-2 | 1060_1 | TAaccacacctcCT |
| 1061 | ttaaccacacctcc | 54574 | 54587 | 2-10-2 | 1061_1 | TTaaccacacctCC |
| 1062 | tttaaccacacctc | 54575 | 54588 | 2-10-2 | 1062_1 | TTtaaccacaccTC |
| 1063 | ttttaaccacacct | 54576 | 54589 | 2-10-2 | 1063_1 | TTttaaccacacCT |
| 1064 | gttttaaccacacc | 54577 | 54590 | 2-10-2 | 1064_1 | GTtttaaccacaCC |
| 1065 | agttttaaccacac | 54578 | 54591 | 2-10-2 | 1065_1 | AGttttaaccacAC |
| 1066 | caacaaaacatcaa | 55228 | 55241 | 2-10-2 | 1066_1 | CAacaaaacatcAA |
| 1067 | tcaacaaaacatca | 55229 | 55242 | 2-10-2 | 1067_1 | TCaacaaaacatCA |
| 1068 | ttcaacaaaacatc | 55230 | 55243 | 2-10-2 | 1068_1 | TTcaacaaaacaTC |
| 1069 | tttcaacaaaacat | 55231 | 55244 | 2-10-2 | 1069_1 | TTtcaacaaaacAT |
| 1070 | ttttcaacaaaaca | 55232 | 55245 | 2-10-2 | 1070_1 | TTttcaacaaaaCA |
| 1071 | gttttcaacaaaac | 55233 | 55246 | 2-10-2 | 1071_1 | GTtttcaacaaaAC |
| 1072 | tgttttcaacaaaa | 55234 | 55247 | 2-10-2 | 1072_1 | TGttttcaacaaAA |
| 1073 | ttctaaaacttacc | 55269 | 55282 | 2-10-2 | 1073_1 | TTctaaaacttaCC |
| 1074 | tttctaaaacttac | 55270 | 55283 | 2-10-2 | 1074_1 | TTtctaaaacttAC |
| 1075 | ctttctaaaactta | 55271 | 55284 | 2-10-2 | 1075_1 | CTttctaaaactTA |
| 1076 | tctttctaaaactt | 55272 | 55285 | 2-10-2 | 1076_1 | TCtttctaaaacTT |
| 1077 | atctttctaaaact | 55273 | 55286 | 2-10-2 | 1077_1 | ATctttctaaaaCT |
| 1078 | aatctttctaaaac | 55274 | 55287 | 2-10-2 | 1078_1 | AAtctttctaaaAC |
| 1079 | gaatctttctaaaa | 55275 | 55288 | 2-10-2 | 1079_1 | GAatctttctaaAA |
| 1080 | agaatctttctaaa | 55276 | 55289 | 2-10-2 | 1080_1 | AGaatctttctaAA |
| 1081 | cagaatctttctaa | 55277 | 55290 | 2-10-2 | 1081_1 | CAgaatctttctAA |
| 1082 | cctttatttccctt | 55494 | 55507 | 2-10-2 | 1082_1 | CCtttatttcccTT |
| 1083 | ccctttatttccct | 55495 | 55508 | 2-10-2 | 1083_1 | CCctttatttccCT |
| 1084 | tccctttatttccc | 55496 | 55509 | 2-10-2 | 1084_1 | TCcctttatttcCC |
| 1085 | ttccctttatttcc | 55497 | 55510 | 2-10-2 | 1085_1 | TTccctttatttCC |
| 1086 | tttccctttatttc | 55498 | 55511 | 2-10-2 | 1086_1 | TTtccctttattTC |
| 1087 | atttccctttattt | 55499 | 55512 | 2-10-2 | 1087_1 | ATttccctttatTT |
| 1088 | tatttccctttatt | 55500 | 55513 | 2-10-2 | 1088_1 | TAtttccctttaTT |
| 1089 | gtatttccctttat | 55501 | 55514 | 2-10-2 | 1089_1 | GTatttccctttAT |

### Example 2: In Vitro Reduction of ATXN3 in SK-N-AS Human Cell Line Using Further LNA Gapmer Oligonucleotides Targeting ATNX3

### Materials and Methods:

[0325] LNA modified oligonucleotides targeting human ATXN3 were tested for their ability to reduce ATXN3 mRNA expression in human SK-N-AS neuroblastoma cells acquired from ECACC Cat: 94092302. The cells were cultured according to the vendor guidelines in Dulbecco's Modified Eagle's Medium, supplemented with 0.1 mM Non-Essential Amino Acids (NEAA) and fetal bovine serum to a final concentration of 10%. Cells were cultured at 37° C., 5% CO2 and 95% humidity in an active evaporation incubator (Thermo C10). Cells were seeded at a density of 9000 cells per well (96-well plate) in 190 ul of SK-N-AS cell culture medium. The cells were hereafter added 10 μl of oligo suspension or PBS (controls) to a final concentration of 5 μM from pre-made 96-well dilution plates. The cell culture plates were incubated for 72 hours in the incubator.

[0326] After incubation, cells were harvested by removal of media followed by cell lysis and RNA purification using QIAGEN RNeasy 96 Kit (cat 74181), following manufacturers protocol. RNA was diluted 2 fold in water prior to the one-step qPCR reaction. For one-step qPCR reaction qPCR-mix (qScript™ XLT One-Step RT-qPCR ToughMix® Low ROX from QuantaBio, cat. no 95134-500) and QPCR was run as duplex QPCR using assays from Integrated DNA technologies for ATXN3 (Hs.PT.58.39355049) and TBP (Hs.PT.58v. 39858774)

Hs.PT.58.39355049 - Primer Sequences
Probe:
(SEQ ID NO: 1130)
5′-/56-FAM/AAAGGCCAG/ZEN/CCACCAGTTCAGG/3IABkFQ/-3′
Primer 1:
(SEQ ID NO: 1129)
5′-CTATCAGGACAGAGTTCACATCC-3′
Primer 2:
(SEQ ID NO: 1128)
5′-GTTTCTAAAGACATGGTCACAGC-3′
Hs.PT.58v.39858774 - Primer Sequences
Probe:
(SEQ ID NO: 1131)
5′- /5HEX/TGA TCT TTG /ZEN/CAG TGA CCC AGC ATC A/
3IABkFQ/ -3′
Primer 1:
(SEQ ID NO: 1132)
5′- GCT GTT TAA CTT CGC TTC CG-3′
Primer 2:
(SEQ ID NO: 1133)
5′- CAG CAA CTT CCT CAA TTC CTT G-3′

[0327] The reactions were then mixed in a qPCR plate (MICROAMP®optical 384 well, 4309849). After sealing, the plate was given a quick spin, 1000 g for 1 minute at RT, and transferred to a Viia™ 7 system (Applied Biosystems, Thermo), and the following PCR conditions used: 50° C. for 15 minutes; 95° C. for 3 minutes; 40 cycles of: 95° C. for 5 sec followed by a temperature decrease of 1.6° C./sec followed by 60° C. for 45 sec. The data was analyzed using the QuantStudio™ Real_time PCR Software and quantity calculated by the delta delta Ct method (Quantity=2\hat{ }(−Ct)*1000000000). Quantity is normalized to the calculated quantity for the housekeeping gene assay (TBP) run in the same well. Relative Target Quantity=QUANTITY_target/QUANTITY_housekeeping (RNA knockdown) was calculated for each well by division with the mean of all PBS-treated wells on the same plate. Normalised Target Quantity=(Relative Target Quantity/[mean] Relative Target Quantity]_pbs_wells)*100.

[0328] Compounds targeting selected target sequence regions of SEQ ID NO:1 were evaluated in the above assay.

### Results:

[0329] The target knock-down data is presented in the following Compound and Data Table: In the Compound table, motif sequences represent the contiguous sequence of nucleobases present in the oligonucleotide.

[0330] Oligonucleotide compound represent specific designs of a motif sequence. Capital letters represent beta-D-oxy LNA nucleosides, lowercase letters represent DNA nucleosides, all LNA C are 5-methyl cytosine, all internucleoside linkages are phosphorothioate internucleoside linkages.

TABLE 4
Compound and Data Table

| | | | | % of |
|---|---|---|---|---|
| | | | | ATXN3 |
| | | | Oligonucleotide | mRNA |
| SEQID | CMPID | Oligonucleotide Base Sequence | compound | remaining |
| 1099 | 1099_1 | CCAAAAGAAACCAAACCC | CCAAaagaaaccaaacCC | 90.6 |
| 1100 | 1100_1 | CCCCATTCAAATATTTATT | CCccattcaaatatttATT | 90.5 |
| 1101 | 1101_1 | AATCATTTACCCCCAAC | AAtcatttaccccCAAC | 92 |
| 1102 | 1102_1 | TATCTCAAACTATCCCCA | TAtctcaaactatcccCA | 93 |
| 1103 | 1103_1 | TCTATTCCTTAACCCAAC | TCTattccttaacccAAC | 76.6 |
| 1104 | 1104_1 | TCCCCTAAATAATTTAATCA | TCccctaaataatttaATCA | 79.3 |
| 1105 | 1105 1 | AAACCACTCCATTCCAA | AaaccactccattCCAA | 57.7 |
| 1106 | 1106_1 | TCTAAACCCCAAACTTTCA | TCtaaaccccaaactttCA | 74.3 |
| 1107 | 1107_1 | TTCTAAACCCCAAACTTTC | TTCtaaaccccaaacttTC | 61.8 |
| 1108 | 1108_1 | AGTTCTAAACCCCAAACT | AGttctaaaccccaaACT | 73.7 |
| 1109 | 1109_1 | TGAAACCATTACTACAACC | TGaaaccattactacAACC | 24.9 |
| 1110 | 1110_1 | ACATCATTTATCACTACCAC | ACAtcatttatcactaccAC | 71.9 |
| 1111 | 1111_1 | AACATTAAACCCTCCCA | AacattaaaccctcCCA | 80.2 |
| 1112 | 1112_1 | TCAGATCCTAAAATCACT | TCAgatcctaaaatcACT | 79.5 |
| 1113 | 1113_1 | CTATACCTAAAACAATCTA | CTAtacctaaaacaatCTA | 99.1 |
| 1114 | 1114_1 | TGATTCTTATACTTACTA | TGAttcttatacttaCTA | 72.1 |
| 1115 | 1115 1 | TAAAAATATAACTACTCCT | TAaaaatataactactCCTA | 93.7 |
| | | A | | |
| 1116 | 1116_1 | TCTTCATTATACCATCAAAT | TCTtcattataccatcaAAT | 51.5 |
| 1117 | 1117_1 | GTTTCATATTTTTAATCC | GTTtcatatttttaaTCC | 37.7 |
| 1118 | 1118_1 | TAATATCCTCATTACCCATT | TAatatcctcattacccaTT | 84 |
| 1119 | 1119_1 | CAAATATTCACAAATCCTA | CAaatattcacaaatCCTA | 73.3 |
| 1120 | 1120_1 | CATCACAAAATAACCTATC | CATcacaaaataacctaTC | 79.9 |
| | | A | A | |
| 1121 | 1121_1 | CTCTCAACTTCTACTACTAA | CTCtcaacttctactactAA | 59.6 |
| 1122 | 1122_1 | AATCTTATTTACATCTTCC | AATcttatttacatctTCC | 20.7 |
| 1123 | 1123_1 | CCAAAATTACTTCTTTTATC | CCAaaattacttcttttATC | 56.5 |
| 1124 | 1124_1 | AACCCAACTTTCTATTTT | AACCcaactttctattTT | 52.7 |
| 1125 | 1125_1 | ACAATATATTCCTCAATCA | ACAatatattcctcaaTCA | 86.8 |
| 1126 | 1126_1 | CCTGTAACAATTATACA | CCTgtaacaattatACA | 92.3 |
| 1127 | 1127_1 | CATCCCTTTACCACTTT | CAtccctttaccactTT | 94.5 |

[0331] In the oligonucleotide compound column, capita letters represent eta-D-oxy LN nucleosides, LNA cytosines are 5-methyl cytosine, lower case letters are DNA nucleosides, and all internucleoside linkages are phosphorothioate.

[0332] As can be seen, most of the above compounds targeting the listed target sequence regions are capable of inhibiting the expression of the human ataxin 3 transcript and that compounds targeting the target sequence region complementary to SEQ ID NOS: 1122 and 1109 are particularly effective in inhibiting the human ataxin 3 transcript. Other effective target sites for ATXN3 can be determined from the above table.

### Example 3

### Materials and Methods:

[0333] The screening assay described in Example 2 was performed using a series of further oligonucleotide targeting human ATXN3 pre-mRNA using the qpCR: (ATXN3_exon_8-9(1) PrimeTime® XL qPCR Assay (IDT).

qPCR probe and primers set 2:

Probe:
(SEQ ID NO: 1134)
5′-/56-FAM/CTCCGCAGG/ZEN/GCT ATTCAGCT AAGT /
31ABkFQ/-3′
Primer 1:
(SEQ ID NO: 1135)
5′-AGT AAGATTTGT ACCTGATGTCTGT-3′
Primer 2:
(SEQ ID NO: 1136)
5′-CATGGAAGATGAGGAAGCAGAT-3′

### Results:

[0334] The results are shown in the following table:

TABLE 5

| | | | | % of |
|---|---|---|---|---|
| | | | | ATXN3 |
| | | | Oligonucleotide | mRNA |
| SEQID | CMPID | Oligonucleotide Base Sequence | compound | remaining |
| 1137 | 1137_1 | CCTACTTCACTTCCTAA | CctacttcacttcCTAA | 68.9 |
| 1138 | 1138_1 | TTTCCTACTTCACTTCCTA | TttcctacttcacttccTA | 95.1 |
| 1139 | 1139_1 | TTCCTACTTCACTTCCTA | TtcctacttcacttcCTA | 85 |
| 1140 | 1140_1 | TTTCCTACTTCACTTCCT | TTtcctacttcacttcCT | 88.1 |
| 1141 | 1141_1 | TTTCCTACTTCACTTCC | TttcctacttcactTCC | 83.1 |
| 1142 | 1142_1 | GTTTCCTACTTCACTTC | GTTtcctacttcactTC | 60.2 |
| 1143 | 1143_1 | ACCAAACCCAAACATCCC | AccaaacccaaacatcCC | 88 |
| 1144 | 1144_1 | AGAAACCAAACCCAAACATC | AgaaaccaaacccaaaCATC | 91.3 |
| 1145 | 1145_1 | AGAAACCAAACCCAAACAT | AGaaaccaaacccaaACAT | 93.5 |
| 1146 | 1146_1 | CTCCTAATACCTAAAAACAA | CTCCtaatacctaaaaacaAA | 100 |
| | | A | | |
| 1147 | 1147_1 | CTCCTAATACCTAAAAACA | CTCCtaatacctaaaaaCA | 94.2 |
| 1148 | 1148_1 | ACTCCTAATACCTAAAAACA | ACTCctaatacctaaaaaCA | 81 |
| 1149 | 1149_1 | CACTCCTAATACCTAAAAAC | CACtcctaatacctaaaaACA | 90.4 |
| | | A | | |
| 1150 | 1150_1 | CCACTCCTAATACCTAAAAA | CCACtcctaatacctaaaAA | 63 |
| 1151 | 1151_1 | TCCACTCCTAATACCTAAAAA | TCCactcctaatacctaaaAA | 54 |
| 1152 | 1152_1 | CCACTCCTAATACCTAAAA | CCACtcctaatacctaaAA | 73.7 |
| 1153 | 1153_1 | TCCACTCCTAATACCTAAAA | TCCactcctaatacctaAAA | 59 |
| 1154 | 1154_1 | CCACTCCTAATACCTAAA | CCACtcctaatacctaAA | 65.2 |
| 1155 | 1155_1 | GTCCACTCCTAATACCTAAA | GtccactcctaataccTAAA | 86.8 |
| 1156 | 1156_1 | CCACTCCTAATACCTAA | CCactcctaatacCTAA | 52.3 |
| 1157 | 1157_1 | TCCACTCCTAATACCTAA | TCcactcctaatacCTAA | 64.3 |
| 1157 | 1157_2 | TCCACTCCTAATACCTAA | TCCActcctaatacctAA | 66 |
| 1158 | 1158_1 | GTCCACTCCTAATACCTAA | GtccactcctaataccTAA | 85.5 |
| 1159 | 1159_1 | AGTCCACTCCTAATACCTA | AgtccactcctaataccTA | 87.4 |
| 1160 | 1160_1 | TCCACTCCTAATACCTA | TCcactcctaatacCTA | 70.1 |
| 1161 | 1161_1 | AGTCCACTCCTAATACCT | AgtccactcctaatacCT | 84.2 |
| 1162 | 1162_1 | GTCCACTCCTAATACC | GTCcactcctaataCC | 57.8 |
| 1163 | 1163_1 | AGTCCACTCCTAATACC | AGtccactcctaataCC | 77.1 |
| 1164 | 1164_1 | CAGTCCACTCCTAATACC | CagtccactcctaatACC | 86.7 |
| 1162 | 1162_2 | GTCCACTCCTAATACC | GTCcactcctaatACC | 67.8 |
| 1165 | 1165_1 | CCAGTCCACTCCTAATAC | CcagtccactcctaaTAC | 85.4 |
| 1166 | 1166_1 | CAGTCCACTCCTAATAC | CAgtccactcctaaTAC | 60.7 |
| 1167 | 1167_1 | AGTCCACTCCTAATAC | AGTCcactcctaatAC | 78.9 |
| 1168 | 1168_1 | CAGTCCACTCCTAATA | CAGtccactcctaaTA | 44.5 |
| 1169 | 1169_1 | CCAGTCCACTCCTAATA | CCagtccactcctaaTA | 33.8 |
| 1170 | 1170_1 | GCAACTCTTTCCAAACA | GCAActctttccaaaCA | 36 |
| 1171 | 1171_1 | AGCAACTCTTTCCAAACA | AGCaactctttccaaaCA | 35.3 |
| 1172 | 1172_1 | CAGCAACTCTTTCCAAACA | CAgcaactctttccaaACA | 58.3 |
| 1173 | 1173_1 | CCAGCAACTCTTTCCAAA | CcagcaactctttcCAAA | 69.7 |
| 1174 | 1174_1 | CCAGCAACTCTTTCCAA | CCagcaactctttcCAA | 42.1 |
| 1175 | 1175_1 | ACCAGCAACTCTTTCCAA | ACcagcaactctttcCAA | 65 |
| 1176 | 1176_1 | TTACCAGCAACTCTTTC | TTACcagcaactcttTC | 53 |
| 1177 | 1177_1 | TGCTCCTCCTATTAAATAA | TGCtcctcctattaaatAA | 76.3 |
| 1178 | 1178_1 | GCTCCTCCTATTAAATAA | GCtcctcctattaaATAA | 61.8 |
| 1179 | 1179_1 | GCTCCTCCTATTAAATA | GCtcctcctattaaATA | 60.2 |
| 1180 | 1180_1 | TGCTCCTCCTATTAAATA | TGctcctcctattaaATA | 70.2 |
| 1181 | 1181_1 | TGCTCCTCCTATTAAAT | TGCtcctcctattaaAT | 80.2 |
| 1182 | 1182_1 | TTGCTCCTCCTATTAAAT | TTGCtcctcctattaaAT | 79 |
| 1183 | 1183_1 | ATTTAATAAAACAAAAACCC | ATttaataaaacaaaaaCCCT | 97.2 |
| | | T | | |
| 1184 | 1184_1 | GCCCAAAAAACTAAATT | GCCCaaaaaactaaaTT | 95.5 |
| 1185 | 1185_1 | GTTTTTACATTCTAACTT | GTTtttacattctaaCTT | 54.1 |
| 1186 | 1186_1 | TGTTTTTACATTCTAACT | TGTTtttacattctaaCT | 63.8 |
| 1187 | 1187_1 | CTGTTTTTACATTCTAAC | CTGTttttacattctaAC | 62.5 |
| 1188 | 1188_1 | CCCCATTCAAATATTTAT | CCCcattcaaatattTAT | 64.9 |
| 1189 | 1189_1 | GCCCCATTCAAATATTTAT | GCcccattcaaatattTAT | 86.2 |
| 1188 | 1188_2 | CCCCATTCAAATATTTAT | CCCCattcaaatatttAT | 96.2 |
| 1190 | 1190_1 | GCCCCATTCAAATATTTA | GCcccattcaaatatTTA | 82.2 |
| 1191 | 1191_1 | CCATTCAAATATATACATTTT | CCATtcaaatatatacattTT | 72 |
| 1191 | 1191_2 | CCATTCAAATATATACATTTT | CCATtcaaataTatacattTT | 37.7 |
| 1192 | 1192_1 | TCCATTCAAATATATACATTT | TCCAttcaaatatatacatTT | 56.8 |
| 1193 | 1193_1 | ATCCATTCAAATATATACATT | ATCCattcaaaTatatacaTT | 48 |
| 1194 | 1194_1 | TCCATTCAAATATATACATT | TCCAttcaaatatatacaTT | 53.7 |
| 1193 | 1193_2 | ATCCATTCAAATATATACATT | ATCCattcaaatatatacaTT | 54.7 |
| 1195 | 1195_1 | TATCCATTCAAATATATACAT | TATccattcaaatatataCAT | 80.1 |
| 1196 | 1196_1 | TCCATTCAAATATATACAT | TCCattcaaatatataCAT | 43.1 |
| 1197 | 1197_1 | ATCCATTCAAATATATACA | ATCCattcaaatatataCA | 53.9 |
| 1198 | 1198_1 | TTATCCATTCAAATATATACA | TTatccattcaaatataTACA | 69.4 |
| 1199 | 1199_1 | TCCATTCAAATATATACA | TCCAttcaaatatataCA | 54.7 |
| 1200 | 1200_1 | TATCCATTCAAATATATACA | TATCcattcaaatatataCA | 53.3 |
| 1201 | 1201_1 | CTTTATCCATTCAAATATATA | CTttatccattcaaataTATA | 85.5 |
| 1202 | 1202_1 | TCTTTATCCATTCAAATATAT | TCTttatccattcaaataTAT | 62.6 |
| 1203 | 1203_1 | CTCTTTATCCATTCAAATATA | CTCtttatccattcaaatATA | 38.4 |
| 1204 | 1204_1 | TCTTTATCCATTCAAATATA | TCtttatccattcaaaTATA | 70.9 |
| 1203 | 1203_2 | CTCTTTATCCATTCAAATATA | CTCTttatccattcaaataTA | 33.6 |
| 1205 | 1205_1 | CTTTATCCATTCAAATATA | CTttatccattcaaaTATA | 78.4 |
| 1206 | 1206_1 | TCTCTTTATCCATTCAAATAT | TCtctttatccattcaaaTAT | 82 |
| 1207 | 1207_1 | CTCTTTATCCATTCAAATAT | CTCtttatccattcaaaTAT | 39.8 |
| 1208 | 1208_1 | TCTTTATCCATTCAAATAT | TCTttatccattcaaaTAT | 63.1 |
| 1209 | 1209_1 | TCTCTTTATCCATTCAAATA | TCtctttatccattcaAATA | 65.2 |
| 1210 | 1210_1 | CTCTTTATCCATTCAAATA | CTCTttatccattcaaaTA | 32.2 |
| 1211 | 1211_1 | TCTCTTTATCCATTCAAAT | TCTCtttatccattcaaAT | 42 |
| 1212 | 1212_1 | TCTCTTTATCCATTCAAA | TCTCtttatccattcaAA | 42.5 |
| 1213 | 1213_1 | AGCACCATATATATCTCA | AgcaccatatatatCTCA | 16 |
| 1214 | 1214_1 | GCACCATATATATCTCA | GCaccatatatatcTCA | 16 |
| 1215 | 1215_1 | CAGCACCATATATATCTCA | CagcaccatatatatCTCA | 19.2 |
| 1215 | 1215_2 | CAGCACCATATATATCTCA | CAgcaccatatatatcTCA | 24.1 |
| 1216 | 1216_1 | AGCACCATATATATCTC | AGCaccatatatatcTC | 19.9 |
| 1217 | 1217_1 | GCACCATATATATCTC | GCACcatatatatcTC | 82.7 |
| 1218 | 1218_1 | CAGCACCATATATATCTC | CAgcaccatatatatCTC | 21.1 |
| 1219 | 1219_1 | CAGCACCATATATATCT | CAGcaccatatataTCT | 28.9 |
| 1220 | 1220_1 | ACAGCACCATATATATCT | ACAGcaccatatatatCT | 21.9 |
| 1221 | 1221_1 | ACAGCACCATATATATC | ACAGcaccatatataTC | 25.4 |
| 1222 | 1222_1 | CTATGTTATTATCCCCA | CTAtgttattatcccCA | 56.1 |
| 1223 | 1223_1 | TCTATGTTATTATCCCC | TctatgttattatcCCC | 47.7 |
| 1224 | 1224_1 | CTCTACACTCTAACTCT | CtctacactctaaCTCT | 79.3 |
| 1225 | 1225_1 | TCTCTACACTCTAACTCT | TctctacactctaaCTCT | 79.6 |
| 1226 | 1226_1 | TTCTCTACACTCTAACTCT | TTCtctacactctaactCT | 86.9 |
| 1227 | 1227_1 | CTTCTCTACACTCTAACTCT | CTtctctacactctaactCT | 97 |
| 1227 | 1227_2 | CTTCTCTACACTCTAACTCT | CttctctacactctaacTCT | 84.5 |
| 1228 | 1228_1 | TTCTCTACACTCTAACTC | TTCtctacactctaacTC | 81.4 |
| 1229 | 1229_1 | CTTCTCTACACTCTAACTC | CttctctacactctaaCTC | 89.1 |
| 1230 | 1230_1 | TCTCTACACTCTAACTC | TCtctacactctaaCTC | 87.3 |
| 1231 | 1231_1 | CCTTCTCTACACTCTAACTC | CcttctctacactctaacTC | 98.3 |
| 1232 | 1232_1 | TTCTCTACACTCTAACT | TTCTctacactctaaCT | 80.1 |
| 1233 | 1233_1 | CTTCTCTACACTCTAACT | CTTctctacactctaaCT | 73.6 |
| 1234 | 1234_1 | CCTTCTCTACACTCTAACT | CcttctctacactctAACT | 77.7 |
| 1235 | 1235_1 | CCTTCTCTACACTCTAAC | CCTtctctacactctaAC | 82.4 |
| 1236 | 1236_1 | CTTCTCTACACTCTAAC | CTtctctacactcTAAC | 90.6 |
| 1237 | 1237_1 | AGCCTTCTCTACACTCTAA | AgccttctctacactcTAA | 80 |
| 1238 | 1238_1 | CCTTCTCTACACTCTAA | CCttctctacactcTAA | 72.2 |
| 1239 | 1239_1 | GCCTTCTCTACACTCTAA | GCcttctctacactctAA | 62.9 |
| 1240 | 1240_1 | AGCCTTCTCTACACTCTA | AgccttctctacactcTA | 85.2 |
| 1241 | 1241_1 | TACTAACTACAACACAAATC | TACtaactacaacacaaaTCA | 91.3 |
| | | A | | |
| 1241 | 1241_2 | TACTAACTACAACACAAATC | TACtaactacAacacaaaTC | 81.1 |
| | | A | A | |
| 1242 | 1242_1 | CTACTAACTACAACACAAAT | CTACtaactacaacacaaaTC | 108 |
| | | C | | |
| 1243 | 1243_1 | CACTACTAACTACAACACAA | CACTactaactacaacacaA | 74 |
| | | A | A | |
| 1244 | 1244_1 | CACTACTAACTACAACACAA | CACtactaactacaacaCAA | 87.4 |
| 1245 | 1245_1 | ACACTACTAACTACAACACA | ACActactaactacaacaCA | 84.1 |
| | | A | A | |
| 1246 | 1246_1 | CACTACTAACTACAACACA | CACTactaactacaacaCA | 83.5 |
| 1247 | 1247_1 | ACACTACTAACTACAACACA | ACACtactaactacaacaCA | 81.3 |
| 1248 | 1248_1 | GACACTACTAACTACAACAC | GACactactaactacaaCAC | 51.6 |
| 1249 | 1249_1 | GACACTACTAACTACAACA | GACActactaactacaaCA | 51 |
| 1250 | 1250_1 | AGACACTACTAACTACAA | AGAcactactaactaCAA | 57.2 |
| 1251 | 1251_1 | AGACACTACTAACTACA | AGACactactaactaCA | 34.7 |
| 1252 | 1252_1 | ATCATTTACCCCCAACCT | AtcatttacccccaacCT | 96 |
| 1253 | 1253_1 | ATCATTTACCCCCAACC | AtcatttacccccAACC | 89.1 |
| 1254 | 1254_1 | CAAATCATTTACCCCCAA | CaaatcatttacccCCAA | 92 |
| 1255 | 1255_1 | CCAAATCATTTACCCCCAA | CcaaatcatttaccccCAA | 91 |
| 1256 | 1256_1 | ACCAAATCATTTACCCCCA | AccaaatcatttaccccCA | 89.9 |
| 1257 | 1257_1 | TACCAAATCATTTACCCCC | TaccaaatcatttacccCC | 84 |
| 1258 | 1258_1 | ACCAAATCATTTACCCC | ACcaaatcatttacCCC | 69.9 |
| 1259 | 1259_1 | TACCAAATCATTTACCCC | TACcaaatcatttaccCC | 56.3 |
| 1260 | 1260_1 | CTACCAAATCATTTACCCC | CtaccaaatcatttaccCC | 94 |
| 1261 | 1261_1 | TACCAAATCATTTACCC | TAccaaatcatttACCC | 68.9 |
| 1262 | 1262_1 | CTACCAAATCATTTACC | CTACcaaatcatttaCC | 70.3 |
| 1263 | 1263_1 | TGCTACCAAATCATTTACC | TgctaccaaatcattTACC | 79 |
| 1264 | 1264_1 | GCTACCAAATCATTTACC | GCtaccaaatcatttACC | 83.6 |
| 1265 | 1265_1 | TGCTACCAAATCATTTAC | TGCTaccaaatcatttAC | 88.3 |
| 1266 | 1266_1 | GCTACCAAATCATTTAC | GCTaccaaatcattTAC | 71.4 |
| 1267 | 1267_1 | TGCTACCAAATCATTTA | TGCtaccaaatcatTTA | 79.8 |
| 1268 | 1268_1 | CTGCTACCAAATCATTTA | CTGctaccaaatcatTTA | 75.3 |
| 1269 | 1269_1 | ACTGCTACCAAATCATTT | ACTGctaccaaatcatTT | 83.4 |
| 1270 | 1270_1 | CTGCTACCAAATCATTT | CTGCtaccaaatcatTT | 83 |
| 1271 | 1271_1 | ACTGCTACCAAATCATT | ACTGctaccaaatcaTT | 71.1 |
| 1272 | 1272_1 | CACTTTGCCATAATCAA | CActttgccataaTCAA | 26 |
| 1273 | 1273_1 | TTATCTCAAACTATCCCCA | TTAtctcaaactatcccCA | 92.9 |
| 1274 | 1274_1 | ATCTCAAACTATCCCCA | ATctcaaactatccCCA | 72.3 |
| 1275 | 1275_1 | CTTATCTCAAACTATCCCCA | CttatctcaaactatcccCA | 85.5 |
| 1276 | 1276_1 | TATCTCAAACTATCCCC | TatctcaaactatcCCC | 79.8 |
| 1277 | 1277_1 | CTTATCTCAAACTATCCCC | CTtatctcaaactatccCC | 84 |
| 1278 | 1278_1 | TTATCTCAAACTATCCCC | TTAtctcaaactatccCC | 89.7 |
| 1279 | 1279_1 | CTTATCTCAAACTATCCC | CttatctcaaactaTCCC | 83.5 |
| 1280 | 1280_1 | CCTTATCTCAAACTATCCC | CcttatctcaaactatcCC | 87.6 |
| 1279 | 1279_2 | CTTATCTCAAACTATCCC | CTtatctcaaactatCCC | 76.9 |
| 1281 | 1281_1 | TTATCTCAAACTATCCC | TtatctcaaactaTCCC | 84.7 |
| 1282 | 1282_1 | CTTATCTCAAACTATCC | CTTatctcaaactaTCC | 78.3 |
| 1283 | 1283_1 | CCCTTATCTCAAACTATCC | CccttatctcaaactaTCC | 76.4 |
| 1284 | 1284_1 | CCTTATCTCAAACTATCC | CCTtatctcaaactatCC | 69.3 |
| 1285 | 1285_1 | CCTTATCTCAAACTATC | CCttatctcaaacTATC | 75.9 |
| 1286 | 1286_1 | GCCCTTATCTCAAACTATC | GCccttatctcaaactaTC | 76.6 |
| 1287 | 1287_1 | CCCTTATCTCAAACTATC | CCcttatctcaaacTATC | 67.2 |
| 1288 | 1288_1 | TGCCCTTATCTCAAACTAT | TgcccttatctcaaacTAT | 90.5 |
| 1289 | 1289_1 | GCCCTTATCTCAAACTAT | GCccttatctcaaacTAT | 71.9 |
| 1290 | 1290_1 | CCCTTATCTCAAACTAT | CCCTtatctcaaactAT | 77.7 |
| 1291 | 1291_1 | GCCCTTATCTCAAACTA | GCccttatctcaaacTA | 68.4 |
| 1292 | 1292_1 | TGCCCTTATCTCAAACTA | TgcccttatctcaaaCTA | 81.5 |
| 1293 | 1293_1 | TGCCCTTATCTCAAACT | TGcccttatctcaaaCT | 75.7 |
| 1294 | 1294_1 | TTGCCCTTATCTCAAAC | TTGCccttatctcaaAC | 89 |
| 1295 | 1295_1 | CTTGCCCTTATCTCAA | CTtgcccttatcTCAA | 48.2 |
| 1296 | 1296_1 | TGAAATCAAACTTCATCA | TGAaatcaaacttcaTCA | 66.5 |
| 1297 | 1297_1 | GGTCACCATACTTAAT | GGTCaccatacttaAT | 89.7 |
| 1298 | 1298_1 | TGCTAACACAAATTTCCT | TGctaacacaaattTCCT | 47.3 |
| 1299 | 1299_1 | GCTAACACAAATTTCCT | GCTaacacaaatttCCT | 48.9 |
| 1299 | 1299_2 | GCTAACACAAATTTCCT | GCtaacacaaattTCCT | 45.7 |
| 1300 | 1300_1 | TTGCTAACACAAATTTCC | TTGCtaacacaaatttCC | 60.7 |
| 1301 | 1301_1 | TGCTAACACAAATTTCC | TGCTaacacaaatttCC | 62.6 |
| 1302 | 1302_1 | TTGCTAACACAAATTTC | TTGCtaacacaaattTC | 72.4 |
| 1303 | 1303_1 | CCTTTGCTAACACAAAT | CCTTtgctaacacaaAT | 48.1 |
| 1304 | 1304_1 | GTATAACCAATAATAACTA | GTAtaaccaataataaCTA | 86.1 |
| 1305 | 1305_1 | TCTGACATCACACAATTT | TCTGacatcacacaatTT | 67.8 |
| 1306 | 1306_1 | TCTGACATCACACAATT | TCTGacatcacacaaTT | 70.2 |
| 1307 | 1307_1 | TATCTGACATCACACAA | TATctgacatcacaCAA | 69.8 |
| 1308 | 1308_1 | CTATTCCTTAACCCAAC | CTattccttaaccCAAC | 77.7 |
| 1309 | 1309_1 | GTCTATTCCTTAACCCAAC | GtctattccttaaccCAAC | 86.2 |
| 1310 | 1310_1 | GTCTATTCCTTAACCCAA | GtctattccttaacCCAA | 60.4 |
| 1311 | 1311_1 | TCTATTCCTTAACCCAA | TCTattccttaaccCAA | 51 |
| 1312 | 1312_1 | GTCTATTCCTTAACCCA | GtctattccttaacCCA | 67.3 |
| 1313 | 1313_1 | GTCTATTCCTTAACCC | GtctattccttaaCCC | 77.4 |
| 1314 | 1314_1 | GGTCTATTCCTTAACC | GGtctattccttaaCC | 83.2 |
| 1315 | 1315_1 | AGAACATTTCCTTCTCCT | AgaacatttccttctcCT | 84.2 |
| 1316 | 1316_1 | AACTGTCCCAAACAACC | AACtgtcccaaacaaCC | 75 |
| 1317 | 1317_1 | TTAGTCTCCCTCATTTTC | TtagtctccctcattTTC | 72.4 |
| 1318 | 1318_1 | ATTTAGTCTCCCTCATT | ATttagtctccctCATT | 48 |
| 1319 | 1319_1 | ATGCATCAAATCTCATA | ATGCatcaaatctcaTA | 83.7 |
| 1320 | 1320_1 | CCTAAATAATTTAATCATTAA | CCTaaataatttaatcatTAA | 94 |
| 1321 | 1321_1 | CCCTAAATAATTTAATCATTA | CCCTaaataatttaatcatTA | 88.8 |
| 1322 | 1322_1 | CCCCTAAATAATTTAATCATT | CCCctaaataatttaatcATT | 80.7 |
| 1323 | 1323_1 | CCCTAAATAATTTAATCATT | CCCTaaataatttaatcaTT | 82.2 |
| 1324 | 1324_1 | CCCTAAATAATTTAATCAT | CCCtaaataatttaatCAT | 87.1 |
| 1325 | 1325_1 | CCCCTAAATAATTTAATCA | CCCctaaataatttaaTCA | 79.9 |
| 1326 | 1326_1 | CCCTAAATAATTTAATCA | CCCtaaataatttaaTCA | 82.5 |
| 1327 | 1327_1 | CCCCTAAATAATTTAATC | CCCCtaaataatttaaTC | 116 |
| 1328 | 1328_1 | TCCCCTAAATAATTTAATC | TCCCctaaataatttaaTC | 109 |
| 1329 | 1329_1 | TTGCTAATATTTCCAAAA | TTGCtaatatttccaaAA | 84.2 |
| 1330 | 1330_1 | CTTGCTAATATTTCCAA | CTtgctaatatttCCAA | 66.1 |
| 1331 | 1331_1 | ACTGTCATCCATATTTCC | ActgtcatccatattTCC | 66.2 |
| 1332 | 1332_1 | ACTGTCATCCATATTTC | ACTgtcatccatatTTC | 48.1 |
| 1333 | 1333_1 | AATGCCCCACTCTAATAT | AATGccccactctaatAT | 36.9 |
| 1334 | 1334_1 | TGCCCCACTCTAATAT | TGCcccactctaatAT | 52.8 |
| 1335 | 1335_1 | ATGCCCCACTCTAATAT | ATgccccactctaaTAT | 43.7 |
| 1336 | 1336_1 | AAATGCCCCACTCTAATA | AAATgccccactctaaTA | 25.7 |
| 1337 | 1337_1 | ATGCCCCACTCTAATA | ATGccccactctaaTA | 28.6 |
| 1338 | 1338_1 | AATGCCCCACTCTAATA | AATGccccactctaaTA | 29.9 |
| 1339 | 1339_1 | TTAAATGCCCCACTCTA | TtaaatgccccactCTA | 51.3 |
| 1340 | 1340_1 | TCTGAAAATTCACTATCT | TCTGaaaattcactatCT | 35.7 |
| 1341 | 1341_1 | GTCTACTATATACATCT | GTCtactatatacaTCT | 30.6 |
| 1342 | 1342_1 | AGTCTACTATATACATCT | AGTCtactatatacatCT | 45.3 |
| 1343 | 1343_1 | AGTCTACTATATACATC | AGTCtactatatacaTC | 57 |
| 1344 | 1344_1 | GTCTACTATATACATC | GTCTactatatacaTC | 46.5 |
| 1345 | 1345_1 | TAGTCTACTATATACATC | TAgtctactatataCATC | 68.3 |
| 1346 | 1346_1 | TAGTCTACTATATACAT | TAGtctactatataCAT | 89 |
| 1347 | 1347_1 | CTAGTCTACTATATACAT | CTAgtctactatataCAT | 86.6 |
| 1348 | 1348_1 | CTAGTCTACTATATACA | CTAGtctactatataCA | 88.5 |
| 1349 | 1349_1 | ACTAGTCTACTATATAC | ACTagtctactataTAC | 85.1 |
| 1350 | 1350_1 | CTAGTCTACTATATAC | CTAgtctactataTAC | 85.3 |
| 1351 | 1351_1 | GTATATTCTACCCATAA | GTAtattctacccaTAA | 51.3 |
| 1352 | 1352_1 | TGTATATTCTACCCATAA | TGTatattctacccaTAA | 48.4 |
| 1353 | 1353_1 | TGTATATTCTACCCATA | TGtatattctaccCATA | 45.6 |
| 1354 | 1354_1 | ATGTATATTCTACCCATA | ATgtatattctaccCATA | 90.2 |
| 1355 | 1355_1 | ATGTATATTCTACCCAT | ATgtatattctacCCAT | 51.1 |
| 1356 | 1356_1 | GAAAACCACACAATTCCTA | GaaaaccacacaattCCTA | 58.9 |
| 1357 | 1357_1 | GAAAACCACACAATTCCT | GAaaaccacacaatTCCT | 56.4 |
| 1358 | 1358_1 | AGAAAACCACACAATTCCT | AGaaaaccacacaattCCT | 58.4 |
| 1359 | 1359_1 | CAGAAAACCACACAATTCC | CAGaaaaccacacaatTCC | 43.3 |
| 1360 | 1360_1 | AGAAAACCACACAATTCC | AGAaaaccacacaatTCC | 47.6 |
| 1361 | 1361_1 | CCAGAAAACCACACAATTC | CCAGaaaaccacacaatTC | 26.3 |
| 1362 | 1362_1 | CCAGAAAACCACACAATT | CCAGaaaaccacacaaTT | 21 |
| 1363 | 1363_1 | TCCAGAAAACCACACAAT | TCCAgaaaaccacacaAT | 47.1 |
| 1364 | 1364_1 | TTCCAGAAAACCACACAA | TTCCagaaaaccacacAA | 49.8 |
| 1364 | 1364_2 | TTCCAGAAAACCACACAA | TTCcagaaaaccacaCAA | 45.8 |
| 1365 | 1365_1 | GATATATCACTAAATCCAT | GAtatatcactaaatCCAT | 27.4 |
| 1366 | 1366_1 | GATATATCACTAAATCCA | GAtatatcactaaaTCCA | 43.7 |
| 1367 | 1367_1 | AGATATATCACTAAATCCA | AGatatatcactaaaTCCA | 37.4 |
| 1368 | 1368_1 | AGATATATCACTAAATCC | AGAtatatcactaaaTCC | 33.6 |
| 1369 | 1369_1 | TCATATATAAATTTCTCTA | TCAtatataaatttctCTA | 78 |
| 1369 | 1369_2 | TCATATATAAATTTCTCTA | TCATatataaatttctcTA | 73.1 |
| 1370 | 1370_1 | TCATATATAAATTTCTCT | TCatatataaatttCTCT | 27.9 |
| 1370 | 1370_2 | TCATATATAAATTTCTCT | TCATatataaatttctCT | 60.2 |
| 1371 | 1371_1 | AAGATCACACAACCATA | AAGAtcacacaaccaTA | 19.8 |
| 1372 | 1372_1 | TAAAAGATCACACAACCA | TAaaagatcacacaACCA | 47.5 |
| 1373 | 1373_1 | CATCACATAAAAACCCACTT | CATcacataaaaacccaCTT | 45.4 |
| 1374 | 1374_1 | CATCACATAAAAACCCACT | CAtcacataaaaaccCACT | 57.9 |
| 1375 | 1375_1 | TCATCACATAAAAACCCACT | TCatcacataaaaaccCACT | 30.1 |
| 1376 | 1376_1 | CATCACATAAAAACCCAC | CAtcacataaaaacCCAC | 61.6 |
| 1377 | 1377_1 | TCATCACATAAAAACCCAC | TCatcacataaaaacCCAC | 30.6 |
| 1378 | 1378_1 | GTCATCACATAAAAACCCAC | GTCatcacataaaaaccCAC | 24.9 |
| 1379 | 1379_1 | GTCATCACATAAAAACCCA | GTCatcacataaaaacCCA | 28.7 |
| 1380 | 1380_1 | TCATCACATAAAAACCCA | TCatcacataaaaaCCCA | 43.9 |
| 1381 | 1381_1 | CATCACATAAAAACCCA | CAtcacataaaaaCCCA | 71.5 |
| 1382 | 1382_1 | TCATCACATAAAAACCC | TCAtcacataaaaaCCC | 42.9 |
| 1383 | 1383_1 | GTCATCACATAAAAACCC | GTCatcacataaaaaCCC | 24.9 |
| 1384 | 1384_1 | AGTCATCACATAAAAACCC | AGtcatcacataaaaACCC | 35.8 |
| 1384 | 1384_2 | AGTCATCACATAAAAACCC | AGTCatcacataaaaacCC | 23 |
| 1385 | 1385_1 | TAGTCATCACATAAAAACC | TAGTcatcacataaaaaCC | 36.3 |
| 1386 | 1386_1 | AGTCATCACATAAAAACC | AGTCatcacataaaaaCC | 34.9 |
| 1387 | 1387_1 | ATGCTAAATACAAATCT | ATGCtaaatacaaatCT | 81 |
| 1388 | 1388_1 | GAAACCATTACTACAACCAA | GAaaccattactacaaCCAA | 20.1 |
| 1389 | 1389_1 | GAAACCATTACTACAACCA | GAaaccattactacaACCA | 15.9 |
| 1390 | 1390_1 | ATGAAACCATTACTACAAC | ATGAaaccattactacaAC | 45.6 |
| 1391 | 1391_1 | CATGAAACCATTACTACA | CATGaaaccattactaCA | 55.9 |
| 1392 | 1392_1 | CCATGAAACCATTACTAC | CCatgaaaccattaCTAC | 29.5 |
| 1393 | 1393_1 | CTCCCATGAAACCATTA | CTCCcatgaaaccatTA | 73.7 |
| 1394 | 1394_1 | TGCTTACTTTATACAAAA | TGCTtactttatacaaAA | 55.9 |
| 1395 | 1395_1 | ATGTTAATACTTTTTCCA | ATGttaatactttttCCA | 92.9 |
| 1396 | 1396_1 | CCTAATTTAACCCACAA | CCTaatttaacccaCAA | 32.2 |
| 1397 | 1397_1 | ATCCTAATTTAACCCACAA | ATCctaatttaacccaCAA | 38.1 |
| 1398 | 1398_1 | TCCTAATTTAACCCACAA | TCCtaatttaacccaCAA | 39.9 |
| 1399 | 1399_1 | TAATCCTAATTTAACCCACAA | TAAtcctaatttaacccaCAA | 72.8 |
| 1400 | 1400_1 | TAATCCTAATTTAACCCACA | TAatcctaatttaaccCACA | 45 |
| 1401 | 1401_1 | AATCCTAATTTAACCCACA | AATCctaatttaacccaCA | 41.2 |
| 1402 | 1402_1 | TCCTAATTTAACCCACA | TCCtaatttaacccACA | 38.3 |
| 1403 | 1403_1 | TAATCCTAATTTAACCCAC | TAatcctaatttaacCCAC | 37.5 |
| 1404 | 1404_1 | ATCCTAATTTAACCCAC | ATcctaatttaacCCAC | 34.4 |
| 1405 | 1405_1 | AATCCTAATTTAACCCAC | AAtcctaatttaacCCAC | 48.2 |
| 1406 | 1406_1 | TAATCCTAATTTAACCCA | TAatcctaatttaaCCCA | 56.5 |
| 1407 | 1407_1 | AATCCTAATTTAACCCA | AAtcctaatttaaCCCA | 71.7 |
| 1408 | 1408_1 | GTAATCCTAATTTAACCCA | GtaatcctaatttaaCCCA | 63.6 |
| 1409 | 1409_1 | TAATCCTAATTTAACCC | TAatcctaatttaACCC | 56.5 |
| 1410 | 1410_1 | GTAATCCTAATTTAACCC | GTaatcctaatttaACCC | 44 |
| 1411 | 1411_1 | AGTAATCCTAATTTAACCC | AGtaatcctaatttaaCCC | 66.2 |
| 1410 | 1410_2 | GTAATCCTAATTTAACCC | GTAatcctaatttaaCCC | 34.2 |
| 1412 | 1412_1 | AGTAATCCTAATTTAACC | AGTAatcctaatttaaCC | 42.7 |
| 1413 | 1413_1 | TCATTTATCACTACCACA | TCAtttatcactaccACA | 26.5 |
| 1414 | 1414_1 | CATCATTTATCACTACCACA | CatcatttatcactacCACA | 46 |
| 1415 | 1415_1 | CATTTATCACTACCACA | CAtttatcactacCACA | 19.4 |
| 1416 | 1416_1 | ATCATTTATCACTACCACA | ATcatttatcactacCACA | 16.8 |
| 1416 | 1416_2 | ATCATTTATCACTACCACA | ATCAtttatcactaccaCA | 14.1 |
| 1417 | 1417_1 | ACATCATTTATCACTACCACA | ACatcatttatcactaccACA | 53.4 |
| 1418 | 1418_1 | TCATTTATCACTACCAC | TCAtttatcactacCAC | 18.9 |
| 1419 | 1419_1 | ATCATTTATCACTACCAC | ATcatttatcactaCCAC | 21.8 |
| 1420 | 1420_1 | CATCATTTATCACTACCAC | CATcatttatcactacCAC | 25.1 |
| 1421 | 1421_1 | AACATCATTTATCACTACCAC | AACatcatttatcactacCAC | 30.5 |
| 1421 | 1421_2 | AACATCATTTATCACTACCAC | AacatcatttatcactaCCAC | 40.4 |
| 1420 | 1420_2 | CATCATTTATCACTACCAC | CatcatttatcactaCCAC | 34.3 |
| 1422 | 1422_1 | AACATCATTTATCACTACCA | AAcatcatttatcactACCA | 34 |
| 1423 | 1423_1 | CATCATTTATCACTACCA | CATCatttatcactacCA | 11.3 |
| 1424 | 1424_1 | TAACATCATTTATCACTACCA | TAacatcatttatcactaCCA | 63.1 |
| 1425 | 1425_1 | ACATCATTTATCACTACCA | ACATcatttatcactacCA | 19 |
| 1422 | 1422_2 | AACATCATTTATCACTACCA | AACatcatttatcactaCCA | 25 |
| 1424 | 1424_2 | TAACATCATTTATCACTACCA | TaacatcatttatcactACCA | 61.3 |
| 1425 | 1425_2 | ACATCATTTATCACTACCA | ACatcatttatcactACCA | 23.5 |
| 1426 | 1426_1 | TAACATCATTTATCACTACC | TAACatcatttatcactaCC | 33.6 |
| 1427 | 1427_1 | ACATCATTTATCACTACC | ACatcatttatcacTACC | 32.3 |
| 1428 | 1428_1 | TTAACATCATTTATCACTACC | TTAacatcatttatcactaCC | 75.5 |
| 1429 | 1429_1 | AACATCATTTATCACTACC | AACAtcatttatcactaCC | 37.3 |
| 1430 | 1430_1 | TTAACATCATTTATCACTAC | TTaacatcatttatcaCTAC | 69.1 |
| 1431 | 1431_1 | TAACATCATTTATCACTAC | TAacatcatttatcaCTAC | 66.6 |
| 1432 | 1432_1 | ATTAACATCATTTATCACTAC | ATtaacatcatttatcaCTAC | 84.2 |
| 1432 | 1432_2 | ATTAACATCATTTATCACTAC | ATtaacatcAtttatcaCTAC | 62.8 |
| 1433 | 1433_1 | ATTAACATCATTTATCACTA | ATTaacatcatttatcaCTA | 81.3 |
| 1434 | 1434_1 | TTAACATCATTTATCACTA | TTAacatcatttatcaCTA | 74.5 |
| 1435 | 1435_1 | TAATTAACATCATTTATCACT | TAattaacatcatttatCACT | 84.3 |
| 1435 | 1435_2 | TAATTAACATCATTTATCACT | TAattaacaTcatttatCACT | 43.3 |
| 1436 | 1436_1 | CTAATTAACATCATTTATCAC | CTaattaacatcatttaTCAC | 81.4 |
| 1436 | 1436_2 | CTAATTAACATCATTTATCAC | CTaattaacAtcatttaTCAC | 46.7 |
| 1437 | 1437_1 | CCTAATTAACATCATTTATCA | CCtaattaacatcatttaTCA | 93.8 |
| 1438 | 1438_1 | CTAATTAACATCATTTATCA | CTAattaacatcatttaTCA | 89.6 |
| 1439 | 1439_1 | CCTAATTAACATCATTTATC | CCTAattaacatcatttaTC | 69.4 |
| 1440 | 1440_1 | CCCTAATTAACATCATTTATC | CCctaattaacatcatttATC | 86.3 |
| 1441 | 1441_1 | CCTAATTAACATCATTTAT | CCTaattaacatcattTAT | 87.4 |
| 1442 | 1442_1 | CCTAATTAACATCATTTA | CCTAattaacatcattTA | 66 |
| 1443 | 1443_1 | CCCTAATTAACATCATTTA | CCCtaattaacatcattTA | 88.7 |
| 1444 | 1444_1 | GCCCTAATTAACATCATTT | GCCctaattaacatcatTT | 87.9 |
| 1445 | 1445_1 | CCCTAATTAACATCATTT | CCCTaattaacatcatTT | 75.6 |
| 1446 | 1446_1 | CGGCCCTAATTAACAT | CGGCcctaattaacAT | 103 |
| 1447 | 1447_1 | CTCGGCCCTAATTAA | CTCggccctaatTAA | 57.4 |
| 1448 | 1448_1 | CACATATAACATATAAACAC | CACAtataacatataaacaCA | 61.7 |
| | | A | | |
| 1449 | 1449_1 | TCACATATAACATATAAACA | TCAcatataacatataaaCAC | 43.6 |
| | | C | | |
| 1450 | 1450_1 | ACTATCACATATAACATATA | ACTAtcacatataacataTA | 58.5 |
| 1451 | 1451_1 | CACTATCACATATAACATATA | CACTatcacatataacataTA | 28.1 |
| 1452 | 1452_1 | CACTATCACATATAACATAT | CACtatcacatataacaTAT | 52 |
| 1453 | 1453_1 | CACTATCACATATAACATA | CACTatcacatataacaTA | 24.3 |
| 1454 | 1454_1 | CACTATCACATATAACAT | CACtatcacatataaCAT | 40.1 |
| 1455 | 1455_1 | CACTATCACATATAACA | CACTatcacatataaCA | 27 |
| 1456 | 1456_1 | CAAAGTTTTCCCATTAC | CAaagttttcccaTTAC | 21 |
| 1457 | 1457_1 | ACAAAGTTTTCCCATTA | ACAaagttttcccaTTA | 20.5 |
| 1458 | 1458_1 | TCAGTCCAACATAACTC | TCAGtccaacataacTC | 15.2 |
| 1459 | 1459_1 | CAGTCCAACATAACTC | CAGtccaacataaCTC | 23.5 |
| 1460 | 1460_1 | ATCAGTCCAACATAACTC | ATCAgtccaacataacTC | 13.7 |
| 1461 | 1461_1 | ATCAGTCCAACATAACT | ATCAgtccaacataaCT | 15.9 |
| 1462 | 1462_1 | TAAACATTAAACCCTCCCAA | TAaacattaaaccctccCAAA | 87 |
| | | A | | |
| 1463 | 1463_1 | AACATTAAACCCTCCCAA | AAcattaaaccctcCCAA | 68.4 |
| 1464 | 1464_1 | TAAACATTAAACCCTCCCAA | TaaacattaaaccctcCCAA | 79.2 |
| 1465 | 1465_1 | AAACATTAAACCCTCCCAA | AAacattaaaccctcCCAA | 70.8 |
| 1466 | 1466_1 | TATAAACATTAAACCCTCCCA | TAtaaacattaaaccctccCA | 94 |
| 1467 | 1467_1 | AACATTAAACCCTCCC | AAcattaaacccTCCC | 78.3 |
| 1468 | 1468_1 | AAACATTAAACCCTCCC | AAacattaaacccTCCC | 89.4 |
| 1469 | 1469_1 | TAAACATTAAACCCTCCC | TAAacattaaaccctCCC | 72.9 |
| 1470 | 1470_1 | ATAAACATTAAACCCTCCC | AtaaacattaaacccTCCC | 86 |
| 1471 | 1471_1 | TATAAACATTAAACCCTCC | TAtaaacattaaaccCTCC | 91.1 |
| 1472 | 1472_1 | TAAACATTAAACCCTCC | TAaacattaaaccCTCC | 82.2 |
| 1473 | 1473_1 | ACTATAAACATTAAACCCTCC | ActataaacattaaaccCTCC | 86.5 |
| 1474 | 1474_1 | ATAAACATTAAACCCTCC | ATaaacattaaaccCTCC | 88.4 |
| 1475 | 1475_1 | AACTATAAACATTAAACCCTC | AActataaacattaaacCCTC | 92.6 |
| 1476 | 1476_1 | CTATAAACATTAAACCCTC | CTataaacattaaacCCTC | 82.9 |
| 1477 | 1477_1 | ACTATAAACATTAAACCCTC | ACtataaacattaaacCCTC | 89.8 |
| 1478 | 1478_1 | AAACTATAAACATTAAACCC | AAactataaacattaaaCCCT | 98.9 |
| | | T | | |
| 1479 | 1479_1 | CTATAAACATTAAACCCT | CTataaacattaaaCCCT | 82.2 |
| 1480 | 1480_1 | ACTATAAACATTAAACCCT | ACtataaacattaaaCCCT | 86.6 |
| 1481 | 1481_1 | AACTATAAACATTAAACCCT | AActataaacattaaaCCCT | 89.5 |
| 1482 | 1482_1 | GCTTTAAACTATAAACATT | GCtttaaactataaaCATT | 58.2 |
| 1483 | 1483_1 | TGCTTTAAACTATAAACA | TGCTttaaactataaaCA | 57.2 |
| 1484 | 1484_1 | CAGATTTATCACTATTA | CAGAtttatcactatTA | 15.4 |
| 1485 | 1485_1 | TCACAGCCTATCACCAC | TCacagcctatcacCAC | 47.3 |
| 1485 | 1485_2 | TCACAGCCTATCACCAC | TCAcagcctatcaccAC | 46.3 |
| 1486 | 1486_1 | ATCACAGCCTATCACCA | AtcacagcctatcACCA | 56.9 |
| 1486 | 1486_2 | ATCACAGCCTATCACCA | ATCacagcctatcacCA | 23.7 |
| 1487 | 1487_1 | AATCACAGCCTATCACC | AATCacagcctatcaCC | 32.9 |
| 1487 | 1487_2 | AATCACAGCCTATCACC | AatcacagcctatCACC | 52.2 |
| 1488 | 1488_1 | ATCACAGCCTATCACC | AtcacagcctatCACC | 60.1 |
| 1489 | 1489_1 | GCGTCACCCAAATCAC | GCgtcacccaaatCAC | 11 |
| 1490 | 1490_1 | AGCGTCACCCAAATCA | AG^{m}cgtcacccaaaTCA | 17.4 |
| 1491 | 1491_1 | AGCGTCACCCAAATC | AG^{m}cgtcacccaAATC | 18.8 |
| 1492 | 1492_1 | CAGATCCTAAAATCACT | CAGAtcctaaaatcaCT | 71.8 |
| 1493 | 1493_1 | TCAGATCCTAAAATCAC | TCAgatcctaaaatCAC | 66.2 |
| 1494 | 1494_1 | AGTAAAACCAATCATCAT | AGTaaaaccaatcatCAT | 30.8 |
| 1495 | 1495_1 | AGTAAAACCAATCATCA | AGTaaaaccaatcaTCA | 24.2 |
| 1496 | 1496_1 | CCCTTCCATCTCTACTAAAA | CccttccatctctactaaAA | 89.7 |
| 1497 | 1497_1 | ATAACTACATAACAAACCCA | ATaactacataacaaaCCCA | 69.1 |
| 1498 | 1498_1 | AATAACTACATAACAAACCC | AAtaactacataacaaaCCCA | 77.8 |
| | | A | | |
| 1499 | 1499_1 | AACTACATAACAAACCCA | AActacataacaaaCCCA | 62.9 |
| 1500 | 1500_1 | TAACTACATAACAAACCCA | TAactacataacaaaCCCA | 65 |
| 1501 | 1501_1 | ACTACATAACAAACCCA | ACtacataacaaaCCCA | 60.4 |
| 1502 | 1502_1 | CAATAACTACATAACAAACC | CAAtaactacataacaaaCCC | 72.6 |
| | | C | | |
| 1503 | 1503_1 | ATAACTACATAACAAACCC | ATAactacataacaaaCCC | 60.2 |
| 1504 | 1504_1 | ACAATAACTACATAACAAAC | ACAataactacataacaaACC | 78.5 |
| | | C | | |
| 1504 | 1504_2 | ACAATAACTACATAACAAAC | ACAAtaactacataacaaaCC | 80.9 |
| | | C | | |
| 1505 | 1505_1 | TGAATTCACAATAACTACA | TGaattcacaataacTACA | 38.1 |
| 1506 | 1506_1 | GCACATTTTTCTTAAACT | GCACatttttcttaaaCT | 62.2 |
| 1507 | 1507_1 | GCTATACCTAAAACAATCT | GCTatacctaaaacaaTCT | 62.2 |
| 1508 | 1508_1 | GCTATACCTAAAACAATC | GCTAtacctaaaacaaTC | 68.9 |
| 1509 | 1509_1 | CCCTTGTAACTAAAAAT | CCCTtgtaactaaaaAT | 100 |
| 1510 | 1510_1 | CCCCTTGTAACTAAAAA | CCCCttgtaactaaaAA | 86.1 |
| 1511 | 1511_1 | CCCCTTGTAACTAAAA | CCCCttgtaactaaAA | 101 |
| 1512 | 1512_1 | ACCCCTTGTAACTAAA | ACCCcttgtaactaAA | 88.8 |
| 1513 | 1513_1 | CACCCCTTGTAACTAA | CAccccttgtaaCTAA | 80.4 |
| 1514 | 1514_1 | ACACCCCTTGTAACTA | ACACcccttgtaacTA | 72.4 |
| 1515 | 1515_1 | GCTAAAACTAATCATCT | GCTaaaactaatcaTCT | 72.2 |
| 1516 | 1516_1 | GGCTAAAACTAATCAT | GGCtaaaactaatCAT | 70.8 |
| 1517 | 1517_1 | TTACCCTTCATATATACATCT | TtacccttcatatatacaTCT | 89.4 |
| 1518 | 1518_1 | ATTACCCTTCATATATACATC | AttacccttcatatataCATC | 82.4 |
| 1519 | 1519_1 | TTACCCTTCATATATACATC | TTAcccttcatatatacATC | 56.3 |
| 1520 | 1520_1 | CATTACCCTTCATATATACAT | CAttacccttcatatataCAT | 84.2 |
| 1521 | 1521_1 | TTACCCTTCATATATACAT | TTAcccttcatatataCAT | 55.3 |
| 1522 | 1522_1 | ATTACCCTTCATATATACAT | ATTacccttcatatataCAT | 49.3 |
| 1523 | 1523_1 | ACATTACCCTTCATATATACA | ACAttacccttcatatataCA | 55.2 |
| 1523 | 1523_2 | ACATTACCCTTCATATATACA | AcattacccttcatataTACA | 63.4 |
| 1524 | 1524_1 | TTACCCTTCATATATACA | TTACccttcatatataCA | 46.9 |
| 1525 | 1525_1 | CATTACCCTTCATATATACA | CattacccttcatataTACA | 66 |
| 1526 | 1526_1 | ATTACCCTTCATATATACA | ATTAcccttcatatataCA | 36.7 |
| 1527 | 1527_1 | ATTACCCTTCATATATAC | ATTacccttcatataTAC | 46.6 |
| 1528 | 1528_1 | TTACCCTTCATATATAC | TTAcccttcatataTAC | 56.9 |
| 1529 | 1529_1 | CATTACCCTTCATATATAC | CATtacccttcatataTAC | 63.4 |
| 1530 | 1530_1 | ACATTACCCTTCATATATAC | ACAttacccttcatataTAC | 34.5 |
| 1531 | 1531_1 | TACATTACCCTTCATATATAC | TAcattacccttcatataTAC | 76.9 |
| 1532 | 1532_1 | CATTACCCTTCATATATA | CAttacccttcataTATA | 76.5 |
| 1533 | 1533_1 | TACATTACCCTTCATATATA | TACattacccttcatatATA | 36.5 |
| 1534 | 1534_1 | ATTACCCTTCATATATA | ATtacccttcataTATA | 78 |
| 1535 | 1535_1 | ACATTACCCTTCATATATA | ACattacccttcataTATA | 59.5 |
| 1536 | 1536_1 | CATTACCCTTCATATAT | CATtacccttcataTAT | 73.7 |
| 1537 | 1537_1 | ACATTACCCTTCATATAT | ACAttacccttcataTAT | 46.1 |
| 1538 | 1538_1 | TACATTACCCTTCATATAT | TACattacccttcataTAT | 36.9 |
| 1539 | 1539_1 | ACATTACCCTTCATATA | ACattacccttcaTATA | 54.2 |
| 1540 | 1540_1 | TACATTACCCTTCATATA | TAcattacccttcaTATA | 71.5 |
| 1541 | 1541_1 | TACATTACCCTTCATAT | TACattacccttcaTAT | 34.5 |
| 1542 | 1542_1 | GATTCTTATACTTACTA | GATtcttatacttaCTA | 46.2 |
| 1543 | 1543_1 | TGATTCTTATACTTACT | TGattcttatactTACT | 45.7 |
| 1544 | 1544_1 | ATGATTCTTATACTTACT | ATGAttcttatacttaCT | 54 |
| 1545 | 1545_1 | GCCTCATTTTTACCTTT | GCctcatttttaccTTT | 82.6 |
| 1546 | 1546_1 | ACCAATCTTCTATTTTA | ACCAatcttctatttTA | 94.8 |
| 1547 | 1547_1 | CAACCAATCTTCTATTTTA | CAACcaatcttctatttTA | 90.3 |
| 1548 | 1548_1 | GCAACCAATCTTCTATTTT | GCAAccaatcttctattTT | 88.3 |
| 1549 | 1549_1 | GCAACCAATCTTCTATTT | GCAaccaatcttctaTTT | 85 |
| 1550 | 1550_1 | GCAACCAATCTTCTATT | GCaaccaatcttcTATT | 87.3 |
| 1551 | 1551_1 | TGCAACCAATCTTCTATT | TGCaaccaatcttctaTT | 90.2 |
| 1552 | 1552_1 | TAACTGCAACCAATCTT | TAactgcaaccaaTCTT | 88.2 |
| 1553 | 1553_1 | TGAATACAACACACATCA | TGAatacaacacacaTCA | 97.4 |
| 1554 | 1554_1 | ATGAATACAACACACATCA | ATGAatacaacacacatCA | 84.4 |
| 1555 | 1555_1 | TAAAAATATAACTACTCCT | TAaaaatataactacTCCT | 99.8 |
| 1556 | 1556_1 | GTAAAAATATAACTACTCC | GTaaaaatataactaCTCC | 93.7 |
| 1557 | 1557_1 | TCAACTGATACCCACAA | TCAactgatacccaCAA | 57.7 |
| 1558 | 1558_1 | TGTCTTAACATTTTTCTT | TGTCttaacatttttcTT | 63.1 |
| 1559 | 1559_1 | CCACTTCAAACTTTTAATTAA | CCActtcaaacttttaatTAA | 85 |
| 1560 | 1560_1 | CCACTTCAAACTTTTAATTA | CCACttcaaacttttaatTA | 84.9 |
| 1561 | 1561_1 | CCCACTTCAAACTTTTAATTA | CCcacttcaaacttttaaTTA | 88.7 |
| 1562 | 1562_1 | CCACTTCAAACTTTTAATT | CCACttcaaacttttaaTT | 79.1 |
| 1563 | 1563_1 | CCCACTTCAAACTTTTAATT | CCCacttcaaacttttaaTT | 86.2 |
| 1564 | 1564_1 | ACCCACTTCAAACTTTTAATT | ACCcacttcaaacttttaaTT | 100 |
| 1565 | 1565_1 | CCACTTCAAACTTTTAAT | CCACttcaaacttttaAT | 85.3 |
| 1566 | 1566_1 | ACCCACTTCAAACTTTTAAT | ACCcacttcaaacttttAAT | 88.8 |
| 1567 | 1567_1 | AACCCACTTCAAACTTTTAAT | AACCcacttcaaacttttaAT | 92.3 |
| 1568 | 1568_1 | CCCACTTCAAACTTTTAA | CCCacttcaaactttTAA | 79.9 |
| 1569 | 1569_1 | ACCCACTTCAAACTTTTAA | ACCcacttcaaactttTAA | 82.5 |
| 1570 | 1570_1 | CCCACTTCAAACTTTTA | CCCacttcaaactttTA | 79.6 |
| 1571 | 1571_1 | ACCCACTTCAAACTTTTA | ACCcacttcaaacttTTA | 77.2 |
| 1572 | 1572_1 | AACCCACTTCAAACTTTTA | AACCcacttcaaactttTA | 86.2 |
| 1573 | 1573_1 | ACCCACTTCAAACTTTT | ACCCacttcaaacttTT | 93.3 |
| 1574 | 1574_1 | AACCCACTTCAAACTTTT | AACCcacttcaaacttTT | 82.7 |
| 1575 | 1575_1 | AACCCACTTCAAACTTT | AACCcacttcaaactTT | 85.8 |
| 1576 | 1576_1 | GGACTCTATTAATCAA | GGActctattaatCAA | 91.7 |
| 1577 | 1577_1 | GAATATTCTACTCTTCT | GAatattctactcTTCT | 95.3 |
| 1578 | 1578_1 | CTGTATTTACCAATTCAA | CTGtatttaccaattCAA | 90.8 |
| 1579 | 1579_1 | CTGTATTTACCAATTCA | CTGTatttaccaattCA | 88.7 |
| 1580 | 1580_1 | ACTGTATTTACCAATTCA | ACTGtatttaccaattCA | 97.3 |
| 1581 | 1581_1 | ACTGTATTTACCAATTC | ACTGtatttaccaatTC | 104 |
| 1582 | 1582_1 | CACTGTATTTACCAATT | CACTgtatttaccaaTT | 91.1 |
| 1583 | 1583_1 | TCACTGTATTTACCAAT | TCACtgtatttaccaAT | 98.6 |
| 1584 | 1584_1 | CCAACTACTTTACTTTTCAAA | CCaactactttacttttCAAA | 84.3 |
| 1585 | 1585_1 | CCAACTACTTTACTTTTCAA | CCaactactttactttTCAA | 80 |
| 1586 | 1586_1 | ACCAACTACTTTACTTTTCAA | ACcaactactttactttTCAA | 85.1 |
| 1585 | 1585_2 | CCAACTACTTTACTTTTCAA | CCAactactttacttttCAA | 75.2 |
| 1587 | 1587_1 | CCAACTACTTTACTTTTCA | CCAactactttacttttCA | 71.9 |
| 1588 | 1588_1 | TACCAACTACTTTACTTTTCA | TaccaactactttacttTTCA | 82.8 |
| 1587 | 1587_2 | CCAACTACTTTACTTTTCA | CCAactactttactttTCA | 67.7 |
| 1589 | 1589_1 | ACCAACTACTTTACTTTTCA | ACcaactactttactttTCA | 84 |
| 1590 | 1590_1 | TACCAACTACTTTACTTTTC | TACcaactactttacttTTC | 75.3 |
| 1591 | 1591_1 | GTACCAACTACTTTACTTT | GTACcaactactttactTT | 75.8 |
| 1592 | 1592_1 | GTACCAACTACTTTACTT | GTAccaactactttaCTT | 65.7 |
| 1593 | 1593_1 | GTACCAACTACTTTACT | GTACcaactactttaCT | 74.5 |
| 1594 | 1594_1 | TGTACCAACTACTTTACT | TGtaccaactacttTACT | 87.1 |
| 1595 | 1595_1 | TTGTACCAACTACTTTAC | TTGtaccaactacttTAC | 73.3 |
| 1596 | 1596_1 | GTACCAACTACTTTAC | GTAccaactacttTAC | 72.5 |
| 1597 | 1597_1 | TGTACCAACTACTTTAC | TGTaccaactacttTAC | 66 |
| 1598 | 1598_1 | TTGTACCAACTACTTTA | TTGTaccaactacttTA | 49.3 |
| 1599 | 1599_1 | ATTTCATTTTTCTTTTAATA | ATTtcatttttcttttaATA | 98.6 |
| 1599 | 1599_2 | ATTTCATTTTTCTTTTAATA | ATTTcatttttcttttaaTA | 90.7 |
| 1600 | 1600_1 | CCTAATTTCATTTTTCTTTT | CCtaatttcatttttcTTTT | 69.2 |
| 1601 | 1601_1 | TCCTAATTTCATTTTTCTTT | TCctaatttcatttttCTTT | 47 |
| 1602 | 1602_1 | TTCTTCATTATACCATCAAAT | TTCTtcattataccatcaaAT | 29.4 |
| 1603 | 1603_1 | TTTCTTCATTATACCATCAAA | TTTCttcattataccatcaAA | 24.1 |
| 1604 | 1604_1 | TTTTCTTCATTATACCATCAA | TTttcttcattataccaTCAA | 14.3 |
| 1605 | 1605_1 | TCTTCATTATACCATCAA | TCttcattataccaTCAA | 5.02 |
| 1606 | 1606_1 | TTTCTTCATTATACCATCAA | TTtcttcattataccaTCAA | 21.2 |
| 1607 | 1607_1 | TTCTTCATTATACCATCAA | TTCttcattataccatCAA | 5.83 |
| 1608 | 1608_1 | ATATTTTCTTCATTATACCAT | AtattttcttcattataCCAT | 76.1 |
| 1609 | 1609_1 | ATATTTTCTTCATTATACCA | ATattttcttcattataCCA | 40.2 |
| 1610 | 1610_1 | AATATTTTCTTCATTATACCA | AATattacttcattataCCA | 37 |
| 1611 | 1611_1 | AAATATTTTCTTCATTATACC | AAatattacttcattaTACC | 23.4 |
| 1612 | 1612_1 | ATATTTTCTTCATTATACC | ATattttcttcattaTACC | 14.2 |
| 1613 | 1613_1 | AATATTTTCTTCATTATACC | AATAttttcttcattataCC | 68 |
| 1614 | 1614_1 | TAAATATTTTCTTCATTATA | TAaatattttcttcatTATA | 96.8 |
| 1615 | 1615_1 | TTTTCCTTCATCTACTTCT | TTTtccttcatctacttCT | 42.8 |
| 1616 | 1616_1 | ATTTTCCTTCATCTACTTCT | ATtttccttcatctacttCT | 76 |
| 1617 | 1617_1 | AATTTTCCTTCATCTACTTC | AATTttccttcatctactTC | 54.9 |
| 1618 | 1618_1 | AGAATTTTCCTTCATCTA | AgaattttccttcaTCTA | 58 |
| 1619 | 1619_1 | CAGAATTTTCCTTCATCT | CAgaattttccttcATCT | 23.5 |
| 1620 | 1620_1 | TCAGAATTTTCCTTCATC | TCAgaattttccttcaTC | 29.7 |
| 1621 | 1621_1 | CTAGAAATATCTCACATT | CTAGaaatatctcacaTT | 64.6 |
| 1622 | 1622_1 | CTAGAAATATCTCACAT | CTAgaaatatctcaCAT | 75.5 |
| 1623 | 1623_1 | ACTAGAAATATCTCACA | ACTAgaaatatctcaCA | 53.2 |
| 1624 | 1624_1 | ATTAGCCATTAATCTAT | ATtagccattaatCTAT | 71.9 |
| 1625 | 1625_1 | TTGTTACAAAATAATCCA | TTgttacaaaataaTCCA | 12 |
| 1625 | 1625_2 | TTGTTACAAAATAATCCA | TTGttacaaaataatCCA | 23.8 |
| 1626 | 1626_1 | TTATTTTTTACATTAACTA | TTAttttttacattaaCTA | 92.1 |
| 1627 | 1627_1 | TGCCAAAATACTAACATCA | TGCcaaaatactaacaTCA | 32 |
| 1628 | 1628_1 | GCCAAAATACTAACATCA | GCCaaaatactaacaTCA | 27.8 |
| 1629 | 1629_1 | TGCCAAAATACTAACATC | TGCCaaaatactaacaTC | 61.5 |
| 1630 | 1630_1 | GAGTACAACACTTACA | GAGTacaacacttaCA | 31.8 |
| 1631 | 1631_1 | CACATCCATTCATTTTAT | CACatccattcatttTAT | 30.6 |
| 1632 | 1632_1 | CCACATCCATTCATTTTAT | CCAcatccattcattttAT | 21.7 |
| 1633 | 1633_1 | CCACATCCATTCATTTTA | CCacatccattcattTTA | 20 |
| 1634 | 1634_1 | TATGCCACATCCATTCAT | TatgccacatccattCAT | 47 |
| 1635 | 1635_1 | TTATGCCACATCCATTCA | TtatgccacatccaTTCA | 20.7 |
| 1636 | 1636_1 | TATGCCACATCCATTCA | TAtgccacatccattCA | 43.3 |
| 1637 | 1637_1 | TTATGCCACATCCATTC | TtatgccacatccATTC | 19.5 |
| 1638 | 1638_1 | ATTATGCCACATCCATT | ATtatgccacatcCATT | 25.1 |
| 1639 | 1639_1 | AGTTTCATATTTTTAATC | AGTttcatatttttaATC | 65.9 |
| 1640 | 1640_1 | ATCACTGCACACTTTCC | ATCactgcacactttCC | 12.9 |
| 1641 | 1641_1 | AAGCTCTTTCCAAATTCT | AAGCtctttccaaattCT | 34.6 |
| 1642 | 1642_1 | TAGTTCTTAACTCTTCTC | TagttcttaactctTCTC | 19.2 |
| 1643 | 1643_1 | TTAGTTCTTAACTCTTC | TTAGttcttaactctTC | 18 |
| 1644 | 1644_1 | AGCTTCAAATACTCAAA | AGCTtcaaatactcaAA | 74.5 |
| 1645 | 1645_1 | TTTCAAAGCCACACCTA | TttcaaagccacaCCTA | 66.9 |
| 1646 | 1646_1 | AATATCCTCATTACCCATT | AATAtcctcattacccaTT | 52.3 |
| 1647 | 1647_1 | TATCCTCATTACCCATT | TAtcctcattaccCATT | 53.4 |
| 1647 | 1647_2 | TATCCTCATTACCCATT | TATCctcattacccaTT | 22.3 |
| 1648 | 1648_1 | ATATCCTCATTACCCATT | ATAtcctcattacccATT | 55.8 |
| 1649 | 1649_1 | AATATCCTCATTACCCAT | AAtatcctcattacCCAT | 46.1 |
| 1650 | 1650_1 | TAATATCCTCATTACCCAT | TAAtatcctcattaccCAT | 58.3 |
| 1651 | 1651_1 | TTAATATCCTCATTACCCAT | TTaatatcctcattaccCAT | 61.8 |
| 1652 | 1652_1 | ATATCCTCATTACCCAT | ATAtcctcattaccCAT | 56.2 |
| 1653 | 1653_1 | AATATCCTCATTACCCA | AAtatcctcattaCCCA | 49.7 |
| 1654 | 1654_1 | TAATATCCTCATTACCCA | TAATatcctcattaccCA | 45.6 |
| 1655 | 1655_1 | TTTAATATCCTCATTACCCA | TttaatatcctcattacCCA | 67.5 |
| 1656 | 1656_1 | TTAATATCCTCATTACCCA | TTaatatcctcattacCCA | 36 |
| 1656 | 1656_2 | TTAATATCCTCATTACCCA | TTAAtatcctcattaccCA | 57.9 |
| 1654 | 1654_2 | TAATATCCTCATTACCCA | TAAtatcctcattacCCA | 40 |
| 1653 | 1653_2 | AATATCCTCATTACCCA | AATatcctcattacCCA | 44.8 |
| 1657 | 1657_1 | ATTTAATATCCTCATTACCC | AtttaatatcctcattaCCC | 59.9 |
| 1658 | 1658_1 | TAATATCCTCATTACCC | TAATatcctcattacCC | 32.9 |
| 1659 | 1659_1 | TTAATATCCTCATTACCC | TTAAtatcctcattacCC | 42 |
| 1660 | 1660_1 | TTTAATATCCTCATTACCC | TttaatatcctcattACCC | 41.1 |
| 1661 | 1661_1 | AATTTAATATCCTCATTACCC | AatttaatatcctcattaCCC | 61 |
| 1662 | 1662_1 | TTTAATATCCTCATTACC | TTTAatatcctcattaCC | 60.6 |
| 1663 | 1663_1 | AATTTAATATCCTCATTACC | AAtttaatatcctcatTACC | 58.8 |
| 1664 | 1664_1 | TTAATATCCTCATTACC | TTaatatcctcatTACC | 42.3 |
| 1665 | 1665_1 | AAATTTAATATCCTCATTACC | AAatttaatatcctcatTACC | 55.9 |
| 1666 | 1666_1 | ATTTAATATCCTCATTACC | ATttaatatcctcatTACC | 55.5 |
| 1667 | 1667_1 | TAAATTTAATATCCTCATTAC | TAaatttaatatcctcaTTAC | 78 |
| 1668 | 1668_1 | TTAAATTTAATATCCTCATTA | TTAaatttaatatcctcaTTA | 95.2 |
| 1669 | 1669_1 | CTTAAATTTAATATCCTCATT | CTtaaatttaatatcctCATT | 73.2 |
| 1670 | 1670_1 | TCTTAAATTTAATATCCTCAT | TCttaaatttaatatccTCAT | 46.8 |
| 1671 | 1671_1 | TCTTAAATTTAATATCCTCA | TCttaaatttaatatcCTCA | 29.8 |
| 1672 | 1672_1 | TTCTTAAATTTAATATCCTCA | TTCttaaatttaatatccTCA | 35 |
| 1673 | 1673_1 | TTCTTAAATTTAATATCCTC | TTcttaaatttaatatCCTC | 36.2 |
| 1674 | 1674_1 | TCTTAAATTTAATATCCTC | TCttaaatttaatatCCTC | 25.1 |
| 1675 | 1675_1 | TTCTTAAATTTAATATCCT | TTCttaaatttaatatCCT | 46.9 |
| 1676 | 1676_1 | TCTTAAATTTAATATCCT | TCttaaatttaataTCCT | 50.9 |
| 1677 | 1677_1 | AATAGCCTTTATTCTAC | AAtagcctttattCTAC | 33.6 |
| 1678 | 1678_1 | CAGCAACAATTATTAATA | CAGCaacaattattaaTA | 70.5 |
| 1679 | 1679_1 | CCAGCAACAATTATTAAT | CCAGcaacaattattaAT | 64.2 |
| 1680 | 1680_1 | ACCAGCAACAATTATTAA | ACCagcaacaattatTAA | 20.5 |
| 1680 | 1680_2 | ACCAGCAACAATTATTAA | ACCAgcaacaattattAA | 39.7 |
| 1681 | 1681_1 | ACCAGCAACAATTATTA | ACCAgcaacaattatTA | 39.4 |
| 1682 | 1682_1 | TACCAGCAACAATTATT | TACCagcaacaattaTT | 26.4 |
| 1683 | 1683_1 | CCCCAAATCTAAAACACTTC | CCccaaatctaaaacacTTC | 79.4 |
| 1684 | 1684_1 | AACCCCAAATCTAAAACACT | AACCccaaatctaaaacacTT | 82 |
| | | T | | |
| 1685 | 1685_1 | CCCCAAATCTAAAACACTT | CCCcaaatctaaaacacTT | 86.4 |
| 1686 | 1686_1 | AACCCCAAATCTAAAACACT | AACCccaaatctaaaacaCT | 75.2 |
| 1687 | 1687_1 | ACCCCAAATCTAAAACACT | ACcccaaatctaaaaCACT | 72.5 |
| 1688 | 1688_1 | ACCCCAAATCTAAAACAC | ACCccaaatctaaaaCAC | 80.9 |
| 1689 | 1689_1 | GCAAATATTCACAAATCCT | GCAaatattcacaaatCCT | 20.7 |
| 1689 | 1689_2 | GCAAATATTCACAAATCCT | GCaaatattcacaaaTCCT | 29.3 |
| 1690 | 1690_1 | ACTATTTAACACACATTATCA | ACTatttaacacacattaTCA | 36.6 |
| 1691 | 1691_1 | CTATTTAACACACATTATCA | CTAtttaacacacattaTCA | 49.6 |
| 1692 | 1692_1 | TACTATTTAACACACATTATC | TACTatttaacacacattaTC | 52.4 |
| 1693 | 1693_1 | ACTATTTAACACACATTATC | ACTAtttaacacacattaTC | 51.8 |
| 1694 | 1694_1 | TACTATTTAACACACATTAT | TACtatttaacacacatTAT | 91.1 |
| 1695 | 1695_1 | CTACTATTTAACACACATTAT | CTActatttaacacacatTAT | 72.7 |
| 1696 | 1696_1 | CTACTATTTAACACACATTA | CTACtatttaacacacatTA | 47.4 |
| 1697 | 1697_1 | ACTACTATTTAACACACATTA | ACTActatttaacacacatTA | 38.3 |
| 1698 | 1698_1 | CTACTATTTAACACACATT | CTACtatttaacacacaTT | 41.6 |
| 1699 | 1699_1 | ACTACTATTTAACACACATT | ACtactatttaacacaCATT | 40.3 |
| 1700 | 1700_1 | ACTACTATTTAACACACAT | ACTactatttaacacaCAT | 36.8 |
| 1701 | 1701_1 | CTACTATTTAACACACA | CTACtatttaacacaCA | 45.9 |
| 1702 | 1702_1 | ACTACTATTTAACACACA | ACTActatttaacacaCA | 32.6 |
| 1703 | 1703_1 | TATAGACCCTTAATATT | TATAgacccttaataTT | 41.4 |
| 1704 | 1704_1 | TTATAGACCCTTAATAT | TTAtagacccttaaTAT | 68.5 |
| 1705 | 1705_1 | CATCACAAAATAACCTATCAT | CAtcacaaaataacctaTCAT | 86.8 |
| 1706 | 1706_1 | TCATCACAAAATAACCTATCA | TCAtcacaaaataacctaTCA | 67.4 |
| 1707 | 1707_1 | TTCATCACAAAATAACCTATC | TTCAtcacaaaataacctaTC | 49 |
| 1708 | 1708_1 | TTCATCACAAAATAACCTA | TTcatcacaaaataaCCTA | 76.4 |
| 1709 | 1709_1 | TTTCATCACAAAATAACCTA | TTtcatcacaaaataaCCTA | 88.6 |
| 1710 | 1710_1 | TCATCACAAAATAACCTA | TCatcacaaaataaCCTA | 59.2 |
| 1711 | 1711_1 | TTTTCATCACAAAATAACCTA | TTttcatcacaaaataaCCTA | 86.1 |
| 1712 | 1712_1 | ATTTTCATCACAAAATAACCT | ATTttcatcacaaaataaCCT | 64.8 |
| 1713 | 1713_1 | TATTTTCATCACAAAATAACC | TATTttcatcacaaaataaCC | 76.9 |
| 1713 | 1713_2 | TATTTTCATCACAAAATAACC | TATTttcatcaCaaaataaCC | 56 |
| 1714 | 1714_1 | GTATTTTCATCACAAAATA | GTATtttcatcacaaaaTA | 47 |
| 1715 | 1715_1 | TTACCTAGATCACTCC | TtacctagatcaCTCC | 73.1 |
| 1716 | 1716_1 | CTTACCTAGATCACTC | CTTacctagatcaCTC | 81.5 |
| 1717 | 1717_1 | CCTTACCTAGATCACT | CCTtacctagatcaCT | 95.9 |
| 1718 | 1718_1 | TAACTGCTCCTTAATCC | TAActgctccttaatCC | 34.8 |
| 1719 | 1719_1 | TCTAGCAATCCTCTCCT | TCtagcaatcctctcCT | 64.2 |
| 1720 | 1720_1 | TTCTAGCAATCCTCTCC | TtctagcaatcctcTCC | 70.4 |
| 1721 | 1721_1 | TTTTCACCTACTAATATTCAT | TTttcacctactaatatTCAT | 55.3 |
| 1722 | 1722_1 | TTTCACCTACTAATATTCAT | TTtcacctactaatatTCAT | 66.2 |
| 1723 | 1723_1 | TTCACCTACTAATATTCAT | TTCacctactaatattCAT | 17.2 |
| 1724 | 1724_1 | TCACCTACTAATATTCAT | TCAcctactaatattCAT | 23.5 |
| 1725 | 1725_1 | TCACCTACTAATATTCA | TCAcctactaatatTCA | 21.1 |
| 1726 | 1726_1 | TTTCACCTACTAATATTCA | TTTCacctactaatattCA | 16.7 |
| 1727 | 1727_1 | TTTTCACCTACTAATATTCA | TTttcacctactaataTTCA | 31.3 |
| 1728 | 1728_1 | TTTTTCACCTACTAATATTCA | TTtttcacctactaataTTCA | 45.3 |
| 1729 | 1729_1 | TTCACCTACTAATATTCA | TTCAcctactaatattCA | 24.7 |
| 1730 | 1730_1 | ATTTTTCACCTACTAATATTC | ATTtttcacctactaataTTC | 48.5 |
| 1731 | 1731_1 | TTTTTCACCTACTAATATTC | TTTttcacctactaataTTC | 31.5 |
| 1732 | 1732_1 | TATTTTTCACCTACTAATATT | TAtttttcacctactaaTATT | 90.2 |
| 1733 | 1733_1 | TATTTTTCACCTACTAATAT | TATttttcacctactaaTAT | 89.1 |
| 1734 | 1734_1 | TTATTTTTCACCTACTAATAT | TTAtttttcacctactaaTAT | 86.1 |
| 1735 | 1735_1 | TTATTTTTCACCTACTAATA | TTATttttcacctactaaTA | 52.9 |
| 1736 | 1736_1 | TATTTTTCACCTACTAATA | TATTtttcacctactaaTA | 54.9 |
| 1737 | 1737_1 | TTTATTTTTCACCTACTAATA | TTTAtttttcacctactaaTA | 52 |
| 1738 | 1738_1 | TTTATTTTTCACCTACTAA | TTtatttttcacctaCTAA | 51.2 |
| 1739 | 1739_1 | TTTATTTTTCACCTACTA | TTTatttttcacctaCTA | 19 |
| 1740 | 1740_1 | CTCAACTTCTACTACTAATT | CTCAacttctactactaaTT | 19.7 |
| 1741 | 1741_1 | TCTCAACTTCTACTACTAATT | TCTCaacttctactactaaTT | 25.8 |
| 1742 | 1742_1 | CTCTCAACTTCTACTACTAAT | CTCtcaacttctactactAAT | 43 |
| 1743 | 1743_1 | CTCAACTTCTACTACTAAT | CTCAacttctactactaAT | 20.1 |
| 1744 | 1744_1 | TCTCAACTTCTACTACTAAT | TCTCaacttctactactaAT | 22.8 |
| 1745 | 1745_1 | TCTCTCAACTTCTACTACTAA | TCtctcaacttctactacTAA | 58.4 |
| 1746 | 1746_1 | CTCAACTTCTACTACTAA | CTcaacttctactaCTAA | 47.3 |
| 1747 | 1747_1 | TCTCAACTTCTACTACTAA | TCtcaacttctactaCTAA | 56.3 |
| 1748 | 1748_1 | CTCAACTTCTACTACTA | CTCaacttctactaCTA | 10.7 |
| 1749 | 1749_1 | TTCTCTCAACTTCTACTACTA | TtctctcaacttctactaCTA | 79.1 |
| 1750 | 1750_1 | TCTCTCAACTTCTACTACTA | TCtctcaacttctactacTA | 61.2 |
| 1751 | 1751_1 | TCTCAACTTCTACTACTA | TCtcaacttctactaCTA | 66.8 |
| 1752 | 1752_1 | CTCTCAACTTCTACTACTA | CtctcaacttctactACTA | 61.7 |
| 1753 | 1753_1 | CTCTCAACTTCTACTACT | CTCtcaacttctactaCT | 37.9 |
| 1754 | 1754_1 | TCTCAACTTCTACTACT | TCtcaacttctacTACT | 51.1 |
| 1755 | 1755_1 | TCTCTCAACTTCTACTACT | TCtctcaacttctactACT | 44.2 |
| 1756 | 1756_1 | TTTCTCTCAACTTCTACTACT | TTtctctcaacttctactACT | 65.7 |
| 1757 | 1757_1 | TTCTCTCAACTTCTACTACT | TTCtctcaacttctactaCT | 33.5 |
| 1758 | 1758_1 | TTTCTCTCAACTTCTACTAC | TTtctctcaacttctacTAC | 67.9 |
| 1759 | 1759_1 | CTCTCAACTTCTACTAC | CTCtcaacttctacTAC | 34.1 |
| 1760 | 1760_1 | TTCTCTCAACTTCTACTAC | TtctctcaacttctaCTAC | 63.8 |
| 1761 | 1761_1 | TTTTCTCTCAACTTCTACTAC | TTTTctctcaacttctactAC | 20.6 |
| 1762 | 1762_1 | TCTCTCAACTTCTACTAC | TCtctcaacttctacTAC | 49.7 |
| 1763 | 1763_1 | TTTCTCTCAACTTCTACTA | TTtctctcaacttctaCTA | 60.2 |
| 1764 | 1764_1 | TTTTCTCTCAACTTCTACTA | TtactctcaacttctACTA | 52.2 |
| 1765 | 1765_1 | TTTTTCTCTCAACTTCTACTA | TTTttctctcaacttctacTA | 40.2 |
| 1766 | 1766_1 | TCTCTCAACTTCTACTA | TCtctcaacttctaCTA | 47.5 |
| 1767 | 1767_1 | TTCTCTCAACTTCTACTA | TTCtctcaacttctacTA | 35.1 |
| 1768 | 1768_1 | TTTCTCTCAACTTCTACT | TTTCtctcaacttctaCT | 28.6 |
| 1769 | 1769_1 | TTTTCTCTCAACTTCTACT | TTTtctctcaacttctaCT | 44.1 |
| 1770 | 1770_1 | CTTTTTCTCTCAACTTCTACT | CtttttctctcaacttctaCT | 99.8 |
| 1771 | 1771_1 | TTTTTCTCTCAACTTCTACT | TTTttctctcaacttctaCT | 43.7 |
| 1772 | 1772_1 | CTTTTTCTCTCAACTTCTAC | CTTtttctctcaacttctAC | 36.2 |
| 1773 | 1773_1 | ACTTTTTCTCTCAACTTCTAC | ACTttttctctcaacttctAC | 35.6 |
| 1774 | 1774_1 | TTTTCTCTCAACTTCTAC | TtttctctcaacttCTAC | 38.6 |
| 1775 | 1775_1 | TTTTTCTCTCAACTTCTAC | TttttctctcaacttCTAC | 42.1 |
| 1776 | 1776_1 | CTTTTTCTCTCAACTTCTA | CTttttctctcaacttCTA | 41.2 |
| 1777 | 1777_1 | TACTTTTTCTCTCAACTTCTA | TactttttctctcaacttCTA | 69.4 |
| 1778 | 1778_1 | ACTTTTTCTCTCAACTTCTA | ActttttctctcaacttCTA | 66.2 |
| 1779 | 1779_1 | TTTTTCTCTCAACTTCTA | TttttctctcaactTCTA | 35.5 |
| 1780 | 1780_1 | TACTTTTTCTCTCAACTTCT | TActttttctctcaacttCT | 65 |
| 1781 | 1781_1 | TTACTTTTTCTCTCAACTTCT | TtactttttctctcaactTCT | 62.1 |
| 1782 | 1782_1 | TTACTTTTTCTCTCAACTTC | TTActttttctctcaactTC | 38.9 |
| 1783 | 1783_1 | TACTTTTTCTCTCAACTTC | TACtttttctctcaactTC | 34 |
| 1784 | 1784_1 | ACTTTTTCTCTCAACTTC | ActttttctctcaaCTTC | 19.7 |
| 1785 | 1785_1 | TTACTTTTTCTCTCAACTT | TTActttttctctcaaCTT | 22 |
| 1786 | 1786_1 | TACTTTTTCTCTCAACTT | TACtttttctctcaaCTT | 22.3 |
| 1787 | 1787_1 | TTACTTTTTCTCTCAACT | TTACtttttctctcaaCT | 11.6 |
| 1788 | 1788_1 | GTTACTTTTTCTCTCAACT | GTtactttttctctcAACT | 43.2 |
| 1789 | 1789_1 | GTTACTTTTTCTCTCAAC | GTtactttttctctCAAC | 29 |
| 1790 | 1790_1 | GTTACTTTTTCTCTCAA | GTtactttttctcTCAA | 5.53 |
| 1791 | 1791_1 | AGTTACTTTTTCTCTCAA | AGTtactttttctctCAA | 6.5 |
| 1792 | 1792_1 | CTTTTACATTCCCATTAACA | CTTTtacattcccattaaCA | 24.5 |
| 1793 | 1793_1 | CACTTTTACATTCCCATTAAC | CACttttacattcccattaAC | 25.3 |
| 1794 | 1794_1 | CTTTTACATTCCCATTAAC | CTtttacattcccatTAAC | 21.5 |
| 1795 | 1795_1 | ACTTTTACATTCCCATTAAC | ACttttacattcccatTAAC | 23 |
| 1796 | 1796_1 | ACTTTTACATTCCCATTAA | ACttttacattcccaTTAA | 30 |
| 1797 | 1797_1 | CTTTTACATTCCCATTAA | CTtttacattcccaTTAA | 27.4 |
| 1798 | 1798_1 | CACTTTTACATTCCCATTAA | CActtttacattcccaTTAA | 28 |
| 1798 | 1798_2 | CACTTTTACATTCCCATTAA | CACttttacattcccatTAA | 15.9 |
| 1799 | 1799_1 | TACACTTTTACATTCCCATTA | TAcacttttacattcccatTA | 52.2 |
| 1800 | 1800_1 | ACTTTTACATTCCCATTA | ACTtttacattcccaTTA | 13.1 |
| 1801 | 1801_1 | CACTTTTACATTCCCATTA | CActtttacattcccATTA | 15.7 |
| 1802 | 1802_1 | ACACTTTTACATTCCCATTA | ACacttttacattcccaTTA | 19.1 |
| 1802 | 1802_2 | ACACTTTTACATTCCCATTA | ACActtttacattcccatTA | 9.66 |
| 1803 | 1803_1 | CACTTTTACATTCCCATT | CActtttacattccCATT | 10.2 |
| 1804 | 1804_1 | TACACTTTTACATTCCCATT | TACacttttacattcccaTT | 10.3 |
| 1805 | 1805_1 | ACACTTTTACATTCCCATT | ACACttttacattcccaTT | 4.51 |
| 1805 | 1805_2 | ACACTTTTACATTCCCATT | ACacttttacattccCATT | 6.8 |
| 1806 | 1806_1 | TACACTTTTACATTCCCAT | TACacttttacattccCAT | 3.53 |
| 1806 | 1806_2 | TACACTTTTACATTCCCAT | TACActtttacattcccAT | 4.79 |
| 1807 | 1807_1 | TACACTTTTACATTCCCA | TACacttttacattccCA | 6.35 |
| 1808 | 1808_1 | GTACACTTTTACATTCCCA | GtacacttttacattcCCA | 3 |
| 1808 | 1808_2 | GTACACTTTTACATTCCCA | GTacacttttacattccCA | 16.3 |
| 1809 | 1809_1 | GTACACTTTTACATTCCC | GTAcacttttacattcCC | 4.33 |
| 1810 | 1810_1 | TACACTTTTACATTCCC | TACacttttacattcCC | 3.26 |
| 1811 | 1811_1 | TGTACACTTTTACATTCCC | TGtacacttttacattcCC | 12.3 |
| 1809 | 1809_2 | GTACACTTTTACATTCCC | GtacacttttacattCCC | 2.49 |
| 1812 | 1812_1 | TGTACACTTTTACATTCC | TGtacacttttacatTCC | 2.47 |
| 1813 | 1813_1 | CTGTACACTTTTACATTC | CTGtacacttttacaTTC | 1.89 |
| 1814 | 1814_1 | ATCTTATTTACATCTTCC | ATcttatttacatcTTCC | 5.41 |
| 1815 | 1815_1 | GAATCTTATTTACATCTTC | GAatcttatttacatCTTC | 25.8 |
| 1816 | 1816_1 | GAATCTTATTTACATCTT | GAatcttatttacaTCTT | 19.1 |
| 1817 | 1817_1 | TGAATCTTATTTACATCT | TGAatcttatttacaTCT | 41.3 |
| 1818 | 1818_1 | ATTCAGCTTTTTCAATC | ATTCagctttttcaaTC | 16.8 |
| 1819 | 1819_1 | TTAATTTTCCCTTCACTCCT | TtaattttcccttcactcCT | 85.8 |
| 1820 | 1820_1 | TTAATTTTCCCTTCACTCC | TtaattttcccttcactCC | 85.8 |
| 1821 | 1821_1 | TTAATTTTCCCTTCACTC | TtaattttcccttcACTC | 51 |
| 1822 | 1822_1 | GTTAATTTTCCCTTCACTC | GttaattttcccttcACTC | 27.2 |
| 1823 | 1823_1 | CAAAATTACTTCTTTTATCAT | CAaaattacttcttttaTCAT | 86.7 |
| 1823 | 1823_2 | CAAAATTACTTCTTTTATCAT | CAaaattacTtcttttaTCAT | 51.5 |
| 1824 | 1824_1 | CCAAAATTACTTCTTTTATCA | CCAaaattacttcttttaTCA | 31.3 |
| 1824 | 1824_2 | CCAAAATTACTTCTTTTATCA | CCaaaattacttcttttATCA | 36 |
| 1825 | 1825_1 | TCCAAAATTACTTCTTTTATC | TCcaaaattacttctttTATC | 40.9 |
| 1826 | 1826_1 | TCCAAAATTACTTCTTTTAT | TCCaaaattacttctttTAT | 50.2 |
| 1827 | 1827_1 | CCAAAATTACTTCTTTTAT | CCAaaattacttctttTAT | 70 |
| 1828 | 1828_1 | TTCCAAAATTACTTCTTTTAT | TTCcaaaattacttctttTAT | 64.9 |
| 1829 | 1829_1 | TCCAAAATTACTTCTTTTA | TCCAaaattacttctttTA | 36.9 |
| 1830 | 1830_1 | TTCCAAAATTACTTCTTTTA | TTCCaaaattacttctttTA | 52.2 |
| 1831 | 1831_1 | GTTCCAAAATTACTTCTTT | GTTCcaaaattacttctTT | 54.8 |
| 1832 | 1832_1 | GTTCCAAAATTACTTCTT | GTtccaaaattactTCTT | 12.5 |
| 1833 | 1833_1 | TGTTCCAAAATTACTTCT | TGTtccaaaattactTCT | 20.1 |
| 1834 | 1834_1 | ATGTTCCAAAATTACTTC | ATGTtccaaaattactTC | 23.8 |
| 1835 | 1835_1 | CATATTTTACTCTTTTTATT | CATAttttactctttttaTT | 90.6 |
| 1836 | 1836_1 | CCATATTTTACTCTTTTTAT | CCATattttactctttttAT | 35.4 |
| 1836 | 1836_2 | CCATATTTTACTCTTTTTAT | CCAtattttactcttttTAT | 60.8 |
| 1837 | 1837_1 | CCCATATTTTACTCTTTTTAT | CccatattttactctttTTAT | 75.8 |
| 1838 | 1838_1 | CATATTTTACTCTTTTTAT | CATattttactcttttTAT | 83.2 |
| 1839 | 1839_1 | CCCATATTTTACTCTTTTTA | CCcatattttactcttttTA | 81.1 |
| 1840 | 1840_1 | CCATATTTTACTCTTTTTA | CCatattttactcttTTTA | 24.7 |
| 1841 | 1841_1 | ACCCATATTTTACTCTTTTTA | AcccatattttactcttTTTA | 59 |
| 1842 | 1842_1 | CCATATTTTACTCTTTTT | CCATattttactctttTT | 21.6 |
| 1843 | 1843_1 | CCCATATTTTACTCTTTTT | CCcatattttactcttTTT | 77.2 |
| 1844 | 1844_1 | ACCCATATTTTACTCTTTTT | ACccatattttactctTTTT | 97.4 |
| 1845 | 1845_1 | TACCCATATTTTACTCTTTTT | TAcccatattttactcttTTT | 58.6 |
| 1846 | 1846_1 | TACCCATATTTTACTCTTTT | TACccatattttactctTTT | 20.4 |
| 1847 | 1847_1 | CCCATATTTTACTCTTTT | CCCatattttactcttTT | 93.2 |
| 1848 | 1848_1 | ACCCATATTTTACTCTTTT | ACCcatattttactcttTT | 21.8 |
| 1846 | 1846_2 | TACCCATATTTTACTCTTTT | TAcccatattttactcTTTT | 22.5 |
| 1849 | 1849_1 | TTACCCATATTTTACTCTTTT | TTAcccatattttactcttTT | 41.4 |
| 1850 | 1850_1 | TACCCATATTTTACTCTTT | TAcccatattttactCTTT | 18.9 |
| 1851 | 1851_1 | ACCCATATTTTACTCTTT | ACCcatattttactcTTT | 13.4 |
| 1852 | 1852_1 | TTACCCATATTTTACTCTTT | TTacccatattttactCTTT | 14.5 |
| 1853 | 1853_1 | TTTACCCATATTTTACTCTTT | TTTacccatattttactcTTT | 22.2 |
| 1852 | 1852_2 | TTACCCATATTTTACTCTTT | TTACccatattttactctTT | 16.7 |
| 1853 | 1853_2 | TTTACCCATATTTTACTCTTT | TTTAcccatattttactctTT | 16 |
| 1854 | 1854_1 | TTACCCATATTTTACTCTT | TTAcccatattttactCTT | 14 |
| 1855 | 1855_1 | TTTACCCATATTTTACTCTT | TTtacccatattttacTCTT | 14.9 |
| 1856 | 1856_1 | ACCCATATTTTACTCTT | ACCcatattttactCTT | 8.02 |
| 1857 | 1857_1 | TACCCATATTTTACTCTT | TACccatattttactCTT | 16.7 |
| 1858 | 1858_1 | TACCCATATTTTACTCT | TACccatattttacTCT | 22.3 |
| 1859 | 1859_1 | TTACCCATATTTTACTCT | TTACccatattttactCT | 15.2 |
| 1860 | 1860_1 | TTTACCCATATTTTACTCT | TTTAcccatattttactCT | 11.8 |
| 1861 | 1861_1 | TTACCCATATTTTACTC | TTAcccatattttaCTC | 24.4 |
| 1862 | 1862_1 | TTTACCCATATTTTACTC | TTTacccatattttaCTC | 14 |
| 1863 | 1863_1 | GTTTACCCATATTTTACTC | GTttacccatattttaCTC | 12.2 |
| 1864 | 1864_1 | GTTTACCCATATTTTACT | GTttacccatatttTACT | 24.9 |
| 1865 | 1865_1 | TGTTTACCCATATTTTAC | TGTttacccatatttTAC | 13.1 |
| 1866 | 1866_1 | GTTTACCCATATTTTAC | GTttacccatattTTAC | 13.2 |
| 1867 | 1867_1 | TGTTTACCCATATTTTA | TGTttacccatattTTA | 6.69 |
| 1868 | 1868_1 | TTCTTGCTTCAACCATC | TtcttgcttcaacCATC | 13.6 |
| 1869 | 1869_1 | GTTACCTCCCTTTATAT | GTtacctccctttatAT | 60.9 |
| 1870 | 1870_1 | GGTTACCTCCCTTTAT | GgttacctccctTTAT | 39 |
| 1871 | 1871_1 | AGGTTACCTCCCTTTA | AggttacctcccTTTA | 35.4 |
| 1872 | 1872_1 | ATGTTCTCTATCTCTATA | ATGttctctatctctATA | 53.3 |
| 1873 | 1873_1 | TATGTTCTCTATCTCTA | TAtgttctctatctCTA | 73.4 |
| 1874 | 1874_1 | AGATCAAACTAAAACCT | AGAtcaaactaaaaCCT | 88.7 |
| 1875 | 1875_1 | TGCCCAATTTCACCCAA | TGcccaatttcacccAA | 30.3 |
| 1876 | 1876_1 | TTTGCCCAATTTCACCC | TttgcccaatttcacCC | 53.3 |
| 1877 | 1877_1 | TTTTGCCCAATTTCACC | TTttgcccaatttcaCC | 57.8 |
| 1878 | 1878_1 | TGTATATCAACAATTCAT | TGTatatcaacaattCAT | 20.8 |
| 1879 | 1879_1 | ACATTTCTTTAAAATTTCCA | ACatttctttaaaattTCCA | 96.4 |
| 1879 | 1879_2 | ACATTTCTTTAAAATTTCCA | ACAtttctttaaaatttCCA | 96.6 |
| 1880 | 1880_1 | CACATTTCTTTAAAATTTCCA | CACAtttctttaaaatttcCA | 95.5 |
| 1879 | 1879_3 | ACATTTCTTTAAAATTTCCA | AcatttctttaaaattTCCA | 98.1 |
| 1879 | 1879_4 | ACATTTCTTTAAAATTTCCA | ACATttctttaaaatttcCA | 98 |
| 1881 | 1881_1 | CCACATTTCTTTAAAATTTCC | CcacatttctttaaaatTTCC | 90 |
| 1882 | 1882_1 | CACATTTCTTTAAAATTTCC | CAcatttctttaaaattTCC | 94.8 |
| 1882 | 1882_2 | CACATTTCTTTAAAATTTCC | CAcatttctttaaaatTTCC | 89.1 |
| 1882 | 1882_3 | CACATTTCTTTAAAATTTCC | CACAtttctttaaaatttCC | 94.4 |
| 1883 | 1883_1 | ACATTTCTTTAAAATTTCC | ACAtttctttaaaattTCC | 91.9 |
| 1882 | 1882_4 | CACATTTCTTTAAAATTTCC | CACatttctttaaaattTCC | 92.4 |
| 1884 | 1884_1 | CCACATTTCTTTAAAATTTC | CCACatttctttaaaattTC | 98.3 |
| 1885 | 1885_1 | ACCACATTTCTTTAAAATTTC | ACCAcatttctttaaaattTC | 97.5 |
| 1884 | 1884_2 | CCACATTTCTTTAAAATTTC | CCAcatttctttaaaattTC | 102 |
| 1884 | 1884_3 | CCACATTTCTTTAAAATTTC | CCacatttctttaaaaTTTC | 94.9 |
| 1884 | 1884_4 | CCACATTTCTTTAAAATTTC | CCAcatttctttaaaatTTC | 87.2 |
| 1886 | 1886_1 | ACCACATTTCTTTAAAATTT | ACCAcatttctttaaaatTT | 94.8 |
| 1887 | 1887_1 | ACAAAACCACATTTCTTTAA | ACAaaaccacatttcttTAA | 97.4 |
| 1888 | 1888_1 | CTGTTTTCAAATCATTTC | CTGTtttcaaatcattTC | 15.8 |
| 1889 | 1889_1 | GAACCATTACTATTATCAA | GAaccattactattaTCAA | 27.3 |
| 1890 | 1890_1 | AGAACCATTACTATTATCA | AGAaccattactattaTCA | 19.8 |
| 1891 | 1891_1 | AGAACCATTACTATTATC | AGaaccattactatTATC | 17.9 |
| 1892 | 1892_1 | CTAGAACCATTACTATTA | CTAGaaccattactatTA | 35.3 |
| 1893 | 1893_1 | TAGAACCATTACTATTA | TAGAaccattactatTA | 13.2 |
| 1894 | 1894_1 | CTAGAACCATTACTATT | CTAGaaccattactaTT | 32.1 |
| 1895 | 1895_1 | AGATTACCATCTTTCAAAA | AGATtaccatctttcaaAA | 59.5 |
| 1895 | 1895_2 | AGATTACCATCTTTCAAAA | AGAttaccatctttcaAAA | 54.1 |
| 1896 | 1896_1 | AGATTACCATCTTTCAAA | AGATtaccatctttcaAA | 50.6 |
| 1896 | 1896_2 | AGATTACCATCTTTCAAA | AGattaccatctttCAAA | 42.3 |
| 1897 | 1897_1 | AGATTACCATCTTTCAA | AGAttaccatctttCAA | 32.4 |
| 1898 | 1898_1 | AAGATTACCATCTTTCA | AAGAttaccatctttCA | 47.9 |
| 1899 | 1899_1 | CATGCTCACACATTTTAA | CATgctcacacatttTAA | 60.5 |
| 1899 | 1899_2 | CATGCTCACACATTTTAA | CAtgctcacacattTTAA | 70.3 |
| 1899 | 1899_3 | CATGCTCACACATTTTAA | CAtgctcacacatttTAA | 69.8 |
| 1899 | 1899_4 | CATGCTCACACATTTTAA | CATGctcacacattttAA | 55.9 |
| 1900 | 1900_1 | CTTAAGCTATCTAAACA | CTTAagctatctaaaCA | 82.6 |
| 1901 | 1901_1 | TGAACAATTCAACATTCA | TGAacaattcaacatTCA | 67.7 |
| 1902 | 1902_1 | GATCAAAAAACTTTCCCT | GAtcaaaaaactttCCCT | 76.1 |
| 1903 | 1903_1 | AGATCAAAAAACTTTCCCT | AGatcaaaaaactttCCCT | 70.4 |
| 1904 | 1904_1 | AGATCAAAAAACTTTCCC | AGAtcaaaaaactttCCC | 73.6 |
| 1905 | 1905_1 | TCCTAGATCAAAAAACT | TCCTagatcaaaaaaCT | 69.9 |
| 1906 | 1906_1 | ATTTTTTCTTCTCTTTTCA | ATTTtttcttctcttttCA | 8.98 |
| 1907 | 1907_1 | TATTTTTTCTTCTCTTTTCA | TATtttttcttctcttttCA | 63.8 |
| 1908 | 1908_1 | ATATTTTTTCTTCTCTTTTC | ATattttttcttctctTTTC | 16.1 |
| 1909 | 1909_1 | TCTGCTTTAAAAACTCTC | TCtgctttaaaaacTCTC | 34.3 |
| 1910 | 1910_1 | CTCTGCTTTAAAAACTC | CTCtgctttaaaaaCTC | 51.6 |
| 1911 | 1911_1 | ACTACACAAACACATTCAA | ACtacacaaacacatTCAA | 37.6 |
| 1912 | 1912_1 | CAAACTACACAAACACATTC | CAaactacacaaacacaTTC | 41.2 |
| | | A | A | |
| 1913 | 1913_1 | ACAAACTACACAAACACATT | ACAaactacacaaacacaTT | 63.1 |
| | | C | C | |
| 1914 | 1914_1 | CAACAAACTACACAAACACA | CAAcaaactacacaaacaCA | 86.1 |
| | | T | T | |
| 1915 | 1915_1 | CACAACAAACTACACAAACA | CACaacaaactacacaaaCA | 62.1 |
| | | C | C | |
| 1916 | 1916_1 | TCACAACAAACTACACAAAC | TCACaacaaactacacaaaC | 48.6 |
| | | A | A | |
| 1917 | 1917_1 | TTCACAACAAACTACACAAA | TTCAcaacaaactacacaaA | 58.8 |
| | | C | C | |
| 1918 | 1918_1 | ATTTCACAACAAACTACACA | ATTtcacaacaaactacaCA | 76.8 |
| | | A | A | |
| 1919 | 1919_1 | CAATTTCACAACAAACTACA | CAAtttcacaacaaactaCAC | 70.7 |
| | | C | | |
| 1920 | 1920_1 | TGTAACAATTTCACAACAA | TGTaacaatttcacaaCAA | 59.5 |
| 1921 | 1921_1 | TGTAACAATTTCACAACA | TGTAacaatttcacaaCA | 28.7 |
| 1922 | 1922_1 | TTAAGCCAACCCCACCA | TtaagccaaccccacCA | 83.1 |
| 1923 | 1923_1 | TTTAAGCCAACCCCACC | TttaagccaaccccACC | 69.2 |
| 1924 | 1924_1 | ATTTAAGCCAACCCCAC | AtttaagccaaccCCAC | 60.6 |
| 1925 | 1925_1 | CCAGTAATACAAATTATA | CCAGtaatacaaattaTA | 69.5 |
| 1926 | 1926_1 | CCCAGTAATACAAATTA | CCCAgtaatacaaatTA | 55.9 |
| 1927 | 1927_1 | TCCCAGTAATACAAATT | TCCCagtaatacaaaTT | 64.9 |
| 1928 | 1928_1 | ATCCCAGTAATACAAAT | ATCCcagtaatacaaAT | 65.9 |
| 1929 | 1929_1 | CTACTAGCATCACCACT | CtactagcatcacCACT | 19.8 |
| 1930 | 1930_1 | TTCTACTAGCATCACC | TtctactagcatCACC | 21.8 |
| 1931 | 1931_1 | CTTCTACTAGCATCAC | CTtctactagcaTCAC | 33.2 |
| 1932 | 1932_1 | TAAATTACTCATTAAATCCAT | TAaattactcattaaatCCAT | 77.8 |
| 1933 | 1933_1 | ATAAATTACTCATTAAATCCA | ATaaattactcattaaaTCCA | 52.4 |
| 1934 | 1934_1 | TAAATTACTCATTAAATCCA | TAaattactcattaaaTCCA | 51.6 |
| 1935 | 1935_1 | CATAAATTACTCATTAAATCC | CATaaattactcattaaaTCC | 58.5 |
| 1935 | 1935_2 | CATAAATTACTCATTAAATCC | CATaaattacTcattaaaTCC | 22.3 |
| 1936 | 1936_1 | GATTTATTTTTCTACTTA | GAtttatttttctaCTTA | 66 |
| 1937 | 1937_1 | ATACAACAAACAATTCACTTT | ATacaacaaacaattcaCTTT | 53.2 |
| 1937 | 1937_2 | ATACAACAAACAATTCACTTT | ATACaacaaacaattcactTT | 48.1 |
| 1938 | 1938_1 | CGATACAACAAACAATTCA | CGATacaacaaacaattCA | 23 |
| 1939 | 1939_1 | GAACATCCACACTAACAACA | GAACatccacactaacaaCA | 43.6 |
| 1940 | 1940_1 | ACATCCACACTAACAACA | ACAtccacactaacaACA | 65 |
| 1939 | 1939_2 | GAACATCCACACTAACAACA | GAAcatccacactaacaACA | 52 |
| 1939 | 1939_3 | GAACATCCACACTAACAACA | GAacatccacactaacAACA | 58.1 |
| 1941 | 1941_1 | GAACATCCACACTAACAAC | GAACatccacactaacaAC | 51.3 |
| 1941 | 1941_2 | GAACATCCACACTAACAAC | GAacatccacactaaCAAC | 63.3 |
| 1942 | 1942_1 | TGAACATCCACACTAACAA | TGAacatccacactaaCAA | 57.8 |
| 1943 | 1943_1 | TTGAACATCCACACTAACA | TTGAacatccacactaaCA | 60.3 |
| 1944 | 1944_1 | TGAACATCCACACTAACA | TGAAcatccacactaaCA | 42.6 |
| 1945 | 1945_1 | CATTGAACATCCACACTA | CATtgaacatccacaCTA | 59.4 |
| 1946 | 1946_1 | ATTGAACATCCACACTA | ATTgaacatccacaCTA | 50 |
| 1947 | 1947_1 | CATTGAACATCCACACT | CAttgaacatccaCACT | 43 |
| 1948 | 1948_1 | ACTCATTGAACATCCAC | ACtcattgaacatCCAC | 46.8 |
| 1949 | 1949_1 | TATCTTTATTTAATAATCTT | TATCtttatttaataatcTT | 93.4 |
| 1949 | 1949_2 | TATCTTTATTTAATAATCTT | TAtctttatttaataaTCTT | 96.9 |
| 1950 | 1950_1 | TCTCAAGCTTCACTCTA | TCtcaagcttcactcTA | 78.6 |
| 1951 | 1951_1 | GACAATATATTCCTCAATC | GACAatatattcctcaaTC | 73 |
| 1952 | 1952_1 | GACAATATATTCCTCAAT | GACAatatattcctcaAT | 82 |
| 1952 | 1952_2 | GACAATATATTCCTCAAT | GAcaatatattcctCAAT | 76.8 |
| 1953 | 1953_1 | TCCTGTAACAATTATAC | TCCtgtaacaattaTAC | 95.4 |
| 1954 | 1954_1 | ACCCAGAATAAAAACCAC | ACccagaataaaaaCCAC | 95.5 |
| 1955 | 1955_1 | TTCCACTTTCTTACTCCC | TtccactttcttactcCC | 96.6 |
| 1956 | 1956_1 | TTCCACTTTCTTACTCC | TtccactttcttacTCC | 86.3 |
| 1957 | 1957_1 | TTTCCACTTTCTTACTCC | TttccactttcttacTCC | 89.2 |
| 1958 | 1958_1 | TTTCCACTTTCTTACTC | TTTCcactttcttacTC | 89.2 |
| 1959 | 1959_1 | ATCCCTTTACCACTTTT | ATCcctttaccactTTT | 101 |
| 1960 | 1960_1 | CATCCCTTTACCACTTTT | CAtccctttaccactTTT | 98 |
| 1961 | 1961_1 | TCATCCCTTTACCACTTT | TCatccctttaccactTT | 101 |
| 1962 | 1962_1 | TCATCCCTTTACCACTT | TCAtccctttaccacTT | 96.9 |
| 1963 | 1963_1 | CTCATCCCTTTACCACTT | CtcatccctttaccacTT | 97.7 |
| 1964 | 1964_1 | GTCTACATCTAACCCC | GtctacatctaacCCC | 97 |
| 1965 | 1965_1 | AGTCTACATCTAACCCC | AGtctacatctaaccCC | 99.6 |
| 1966 | 1966_1 | CAGTCTACATCTAACCCC | CagtctacatctaaccCC | 97.4 |
| 1967 | 1967_1 | CAGTCTACATCTAACCC | CagtctacatctaaCCC | 99.5 |
| 1968 | 1968_1 | TCAGTCTACATCTAACCC | TCagtctacatctaacCC | 98.9 |
| 1969 | 1969_1 | AGTCTACATCTAACCC | AGTctacatctaacCC | 98.2 |
| 1970 | 1970_1 | TCAGTCTACATCTAACC | TCagtctacatctAACC | 98.3 |
| 1971 | 1971_1 | TTCAGTCTACATCTAACC | TTCagtctacatctaaCC | 98 |
| 1972 | 1972_1 | TTCAGTCTACATCTAAC | TTCAgtctacatctaAC | 98.7 |
| 1973 | 1973_1 | TTTCAGTCTACATCTAA | TTtcagtctacatCTAA | 90.1 |
| 1974 | 1974_1 | AGTTTTAACCACACCTCCT | AgttttaaccacacctcCT | 102 |
| 1975 | 1975_1 | GTTTTAACCACACCTCC | GTTttaaccacacctCC | 93.7 |
| 1976 | 1976_1 | AGTTTTAACCACACCTCC | AgttttaaccacaccTCC | 95 |
| 1977 | 1977_1 | AGTTTTAACCACACCTC | AGttttaaccacacCTC | 88.7 |
| 1978 | 1978_1 | GAGTTTTAACCACACC | GAGttttaaccacACC | 94.7 |
| 1979 | 1979_1 | CAGATCTTCTCTTTATTT | CAGatcttctctttaTTT | 96.3 |
| 1980 | 1980_1 | TGTTTTCAACAAAACATCA | TGTtttcaacaaaacaTCA | 89.9 |
| 1981 | 1981_1 | TGTTTTCAACAAAACATC | TGttttcaacaaaaCATC | 97.5 |
| 1982 | 1982_1 | CTGTTTTCAACAAAACAT | CTGttttcaacaaaaCAT | 102 |
| 1983 | 1983_1 | TCTGTTTTCAACAAAACA | TCTGttttcaacaaaaCA | 98 |
| 1984 | 1984_1 | ATCTTTCTAAAACTTACC | ATCTttctaaaacttaCC | 96.3 |
| 1985 | 1985_1 | CAGAATCTTTCTAAAACT | CAGAatctttctaaaaCT | 91.7 |
| 1986 | 1986_1 | CTACAGAATCTTTCTAA | CTacagaatctttCTAA | 97.6 |
| 1986 | 1986_2 | CTACAGAATCTTTCTAA | CTAcagaatctttcTAA | 95.6 |
| 1987 | 1987_1 | ATTTCCCTTTATTTCCCTT | AtttccctttatttccCTT | 92 |
| 1988 | 1988_1 | GTATTTCCCTTTATTTCC | GtatttccctttattTCC | 99.5 |

[0335] In the oligonucleotide compound column, capital letters represent beta-D-oxy LNA nucleosides, LNA cytosines are 5-methyl cytosine, lower case letters are DNA nucleosides, and all internucleoside linkages are phosphorothioate. ^{m}c represent 5-methyl cytosine DNA nucleosides (used in compounds 1490_1 and 14911).

### Example 4

### Materials and Methods:

[0336] The screening assay described in Example 2 was performed using a series of further oligonucleotide targeting human ATXN3 pre-mRNA using the qpCR: (ATXN3_exon_8-9(1) PrimeTime® XL qPCR Assay (IDT).

qPCR probe and primers set 2:

Probe:
(SEQ ID NO: 1134)
5′-/56-FAM/CTCCGCAGG/ZEN/GCT ATTCAGCT AAGT /
31ABkFQ/-3′
Primer 1:
(SEQ ID NO: 1135)
5′-AGT AAGATTTGT ACCTGATGTCTGT-3′
Primer 2:
(SEQ ID NO: 1136)
5′-CATGGAAGATGAGGAAGCAGAT-3′

### Results:

TABLE 6

| | | | | % of |
|---|---|---|---|---|
| | | | | ATXN3 |
| | | | Oligonucleottde | mRNA |
| SEQID | CMPID | Oligonucleottde Base Sequence | compound | remaining |
| 1110 | 1110_2 | ACATCATTTATCACTACCAC | ACatcatttatcactacCAC | 44 |
| 1102 | 1102_2 | TATCTCAAACTATCCCCA | TatctcaaactatccCCA | 74 |
| 1104 | 1104_2 | TCCCCTAAATAATTTAATCA | TCCcctaaataatttaaTCA | 78 |
| 1116 | 1116_2 | TCTTCATTATACCATCAAAT | TCTTcattataccatcaaAT | 12 |
| 1121 | 1121_2 | CTCTCAACTTCTACTACTAA | CtctcaacttctactaCTAA | 68 |
| 1114 | 1114_2 | TGATTCTTATACTTACTA | TGATtcttatacttacTA | 64 |
| 1120 | 1120_2 | CATCACAAAATAACCTATCA | CATCacaaaataacctatCA | 38 |
| 1100 | 1100_2 | CCCCATTCAAATATTTATT | CCCcattcaaatatttATT | 79 |
| 1112 | 1112_2 | TCAGATCCTAAAATCACT | TCAGatcctaaaatcaCT | 65 |
| 1123 | 1123_2 | CCAAAATTACTTCTTTTATC | CCaaaattacttctttTATC | 37 |
| 1117 | 1117_2 | GTTTCATATTTTTAATCC | GTttcatatttttaATCC | 10 |
| 1099 | 1099_2 | CCAAAAGAAACCAAACCC | CCaaaagaaaccaaACCC | 88 |
| 1109 | 1109_2 | TGAAACCATTACTACAACC | TGAaaccattactacaACC | 22 |
| 1113 | 1113_2 | CTATACCTAAAACAATCTA | CTatacctaaaacaaTCTA | 86 |
| 1119 | 1119_2 | CAAATATTCACAAATCCTA | CaaatattcacaaatCCTA | 78 |
| 1125 | 1125_2 | ACAATATATTCCTCAATCA | ACaatatattcctcaATCA | 74 |
| 1127 | 1127_2 | CATCCCTTTACCACTTT | CatccctttaccaCTTT | 97 |
| 1118 | 1118_2 | TAATATCCTCATTACCCATT | TaatatcctcattaccCATT | 97 |
| 1103 | 1103_2 | TCTATTCCTTAACCCAAC | TCtattccttaaccCAAC | 81 |
| 1122 | 1122_2 | AATCTTATTTACATCTTCC | AATCttatttacatcttCC | 11 |
| 1126 | 1126_2 | CCTGTAACAATTATACA | CCTGtaacaattataCA | 93 |
| 1122 | 1122_3 | AATCTTATTTACATCTTCC | AatcttatttacaTCtTCC | 54 |
| 1122 | 1122_4 | AATCTTATTTACATCTTCC | AAtcTtatttacAtCttCC | 17 |
| 1122 | 1122_5 | AATCTTATTTACATCTTCC | AAtcttatttacAtCttCC | 21 |
| 1122 | 1122_6 | AATCTTATTTACATCTTCC | AatctTatttacaTCttCC | 12 |
| 1122 | 1122_7 | AATCTTATTTACATCTTCC | AatcttatttacAtCttCC | 28 |
| 1122 | 1122_8 | AATCTTATTTACATCTTCC | AAtcttatttacAtcTTCC | 28 |
| 1122 | 1122_9 | AATCTTATTTACATCTTCC | AAtcTtatttacAtctTCC | 11 |
| 1122 | 1122_10 | AATCTTATTTACATCTTCC | AatctTatttacAtctTCC | 9 |
| 1122 | 1122_11 | AATCTTATTTACATCTTCC | AatcTtatttacatcTTCC | 10 |
| 1122 | 1122_12 | AATCTTATTTACATCTTCC | AATcTtatttacAtcTtCC | 10 |
| 1122 | 1122_13 | AATCTTATTTACATCTTCC | AatCTtatttacAtcttCC | 10 |
| 1122 | 1122_14 | AATCTTATTTACATCTTCC | AatCttatttacatctTCC | 7 |
| 1122 | 1122_15 | AATCTTATTTACATCTTCC | AatcttatttacaTCttCC | 32 |
| 1122 | 1122_16 | AATCTTATTTACATCTTCC | AatCttatttacatcTTCC | 4 |
| 1122 | 1122_17 | AATCTTATTTACATCTTCC | AAtCttatttacatcTtCC | 5 |
| 1122 | 1122_18 | AATCTTATTTACATCTTCC | AaTcTtatttacaTcTtCC | 9 |
| 1122 | 1122_19 | AATCTTATTTACATCTTCC | AatcTTatttacatcTtCC | 5 |
| 1122 | 1122_20 | AATCTTATTTACATCTTCC | AatcTtatttacatCttCC | 13 |
| 1122 | 1122_21 | AATCTTATTTACATCTTCC | AAtcttatttacatCttCC | 23 |
| 1122 | 1122_22 | AATCTTATTTACATCTTCC | AatctTatttacatCttCC | 8 |
| 1122 | 1122_23 | AATCTTATTTACATCTTCC | AatcTTatttacatCttCC | 4 |
| 1122 | 1122_24 | AATCTTATTTACATCTTCC | AatctTatttacatcTTCC | 8 |
| 1122 | 1122_25 | AATCTTATTTACATCTTCC | AATcTTatttacatcTtCC | 5 |
| 1122 | 1122_26 | AATCTTATTTACATCTTCC | AAtctTatttacatcTtCC | 12 |
| 1122 | 1122_27 | AATCTTATTTACATCTTCC | AaTCTtatttacatcTtCC | 3 |
| 1122 | 1122_28 | AATCTTATTTACATCTTCC | AaTcTTatttacatcTtCC | 3 |
| 1122 | 1122_29 | AATCTTATTTACATCTTCC | AatCTTatttacatcTtCC | 3 |
| 1122 | 1122_30 | AATCTTATTTACATCTTCC | AAtcTTatttacatctTCC | 5 |
| 1122 | 1122_31 | AATCTTATTTACATCTTCC | AAtcTtatttacatctTCC | 12 |
| 1122 | 1122_32 | AATCTTATTTACATCTTCC | AAtcttatttacatctTCC | 33 |
| 1122 | 1122_33 | AATCTTATTTACATCTTCC | AatCtTatttacatctTCC | 3 |
| 1122 | 1122_34 | AATCTTATTTACATCTTCC | AatcTTatttacatctTCC | 6 |
| 1122 | 1122_35 | AATCTTATTTACATCTTCC | AatcTtatttacatctTCC | 16 |
| 1122 | 1122_36 | AATCTTATTTACATCTTCC | AATCtTatttacatcttCC | 8 |
| 1122 | 1122_37 | AATCTTATTTACATCTTCC | AAtCTTatttacatcttCC | 5 |
| 1122 | 1122_38 | AATCTTATTTACATCTTCC | AAtCttatttacatcttCC | 16 |
| 1122 | 1122_39 | AATCTTATTTACATCTTCC | AaTCTtatttacatcttCC | 7 |
| 1122 | 1122_40 | AATCTTATTTACATCTTCC | AaTCtTatttacatcttCC | 5 |
| 1122 | 1122_41 | AATCTTATTTACATCTTCC | AatCTTatttacatcttCC | 5 |
| 1122 | 1122_42 | AATCTTATTTACATCTTCC | AatCTtatttacatcttCC | 13 |
| 1122 | 1122_43 | AATCTTATTTACATCTTCC | AatcTTatttacatcttCC | 17 |
| 1109 | 1109_3 | TGAAACCATTACTACAACC | TgaaaccattacTAcaaCC | 58 |
| 1109 | 1109_4 | TGAAACCATTACTACAACC | TgaaaccattacTAcAaCC | 20 |
| 1109 | 1109_5 | TGAAACCATTACTACAACC | TgaAAccattacTacAaCC | 23 |
| 1109 | 1109_6 | TGAAACCATTACTACAACC | TgAaAccattactAcaaCC | 50 |
| 1109 | 1109_7 | TGAAACCATTACTACAACC | TgAaaCcattactAcaaCC | 46 |
| 1109 | 1109_8 | TGAAACCATTACTACAACC | TgaAAccattacTacaaCC | 48 |
| 1109 | 1109_9 | TGAAACCATTACTACAACC | TgaaaccattactaCAaCC | 25 |
| 1109 | 1109_10 | TGAAACCATTACTACAACC | TgaaAccattacTaCaACC | 24 |
| 1109 | 1109_11 | TGAAACCATTACTACAACC | TGaaAccattactaCaaCC | 36 |
| 1109 | 1109_12 | TGAAACCATTACTACAACC | TgAAAccattactaCaaCC | 20 |
| 1109 | 1109_13 | TGAAACCATTACTACAACC | TgAAaCcattactaCaaCC | 26 |
| 1109 | 1109_14 | TGAAACCATTACTACAACC | TgAaaccattactaCaaCC | 27 |
| 1109 | 1109_15 | TGAAACCATTACTACAACC | TGaAaccattacTacAaCC | 14 |
| 1109 | 1109_16 | TGAAACCATTACTACAACC | TgAaaCcattactacAACC | 12 |
| 1109 | 1109_17 | TGAAACCATTACTACAACC | TgaaaCcattacTacAaCC | 36 |
| 1109 | 1109_18 | TGAAACCATTACTACAACC | TgaaaCcattacTacaaCC | 62 |
| 1109 | 1109_19 | TGAAACCATTACTACAACC | TGaaAccattactacaaCC | 47 |
| 1109 | 1109_20 | TGAAACCATTACTACAACC | TgaAaccattactaCAaCC | 19 |
| 1109 | 1109_21 | TGAAACCATTACTACAACC | TgaAaccattactACaACC | 16 |
| 1109 | 1109_22 | TGAAACCATTACTACAACC | TgAAaccattactACaACC | 9 |
| 1109 | 1109_23 | TGAAACCATTACTACAACC | TgAaAccattactAcaACC | 29 |
| 1109 | 1109_24 | TGAAACCATTACTACAACC | TgaaaCcattactAcaACC | 41 |
| 1109 | 1109_25 | TGAAACCATTACTACAACC | TgaAACcattactAcaaCC | 34 |
| 1109 | 1109_26 | TGAAACCATTACTACAACC | TgaAaCcattactaCaaCC | 28 |
| 1109 | 1109_27 | TGAAACCATTACTACAACC | TGaAaCcattactacAACC | 10 |
| 1109 | 1109_28 | TGAAACCATTACTACAACC | TgAAaCcattactAcAACC | 52 |
| 1109 | 1109_29 | TGAAACCATTACTACAACC | TGaAAccattactacaACC | 16 |
| 1109 | 1109_30 | TGAAACCATTACTACAACC | TGAaaccattactacaaCC | 36 |
| 1109 | 1109_31 | TGAAACCATTACTACAACC | TgaaaCcattactaCaACC | 21 |
| 1109 | 1109_32 | TGAAACCATTACTACAACC | TgAAAccattactacAACC | 9 |
| 1109 | 1109_33 | TGAAACCATTACTACAACC | TgAaaCcattactacAaCC | 14 |
| 1109 | 1109_34 | TGAAACCATTACTACAACC | TGaaaccattactacaACC | 43 |
| 1109 | 1109_35 | TGAAACCATTACTACAACC | TgAAaCcattactacaACC | 15 |
| 1109 | 1109_36 | TGAAACCATTACTACAACC | TgaAACcattactacaaCC | 15 |
| 1109 | 1109_37 | TGAAACCATTACTACAACC | TGaAaCcattactacaaCC | 16 |
| 1109 | 1109_38 | TGAAACCATTACTACAACC | TGaaaCcattactacaaCC | 38 |
| 1109 | 1109_39 | TGAAACCATTACTACAACC | TgAAACcattactacaaCC | 14 |
| 1109 | 1109_40 | TGAAACCATTACTACAACC | TgAAaCcattactacaaCC | 16 |
| 1109 | 1109_41 | TGAAACCATTACTACAACC | TgaAaCcattactacaaCC | 28 |
| 1109 | 1109_42 | TGAAACCATTACTACAACC | TgaaACcattactacaaCC | 28 |
| 1122 | 1122_44 | AATCTTATTTACATCTTCC | AatcttatttacaTCTtCC | 65 |
| 1122 | 1122_45 | AATCTTATTTACATCTTCC | AatcTtatttacAtCttCC | 38 |
| 1122 | 1122_46 | AATCTTATTTACATCTTCC | AatcTtatttacaTcTTCC | 34 |
| 1122 | 1122_47 | AATCTTATTTACATCTTCC | AAtCttatttacAtcTtCC | 10 |
| 1122 | 1122_48 | AATCTTATTTACATCTTCC | AAtcTtatttacATcTtCC | 35 |
| 1122 | 1122_49 | AATCTTATTTACATCTTCC | AatCttatttacAtcTtCC | 10 |
| 1122 | 1122_50 | AATCTTATTTACATCTTCC | AAtCttatttacAtcttCC | 11 |
| 1122 | 1122_51 | AATCTTATTTACATCTTCC | AAtctTatttacatCTtCC | 9 |
| 1122 | 1122_52 | AATCTTATTTACATCTTCC | AatcTTatttacAtcTtCC | 12 |
| 1122 | 1122_53 | AATCTTATTTACATCTTCC | AatctTatttacatCTtCC | 8 |
| 1122 | 1122_54 | AATCTTATTTACATCTTCC | AaTcTtatttacatcTTCC | 4 |
| 1122 | 1122_55 | AATCTTATTTACATCTTCC | AAtcttatttacAtcTtCC | 27 |
| 1122 | 1122_56 | AATCTTATTTACATCTTCC | AAtCtTatttacAtcttCC | 5 |
| 1122 | 1122_57 | AATCTTATTTACATCTTCC | AAtcTTatttacatcttCC | 14 |
| 1122 | 1122_58 | AATCTTATTTACATCTTCC | AaTCttatttacatcttCC | 13 |
| 1122 | 1122_59 | AATCTTATTTACATCTTCC | AATcttatttacatCttCC | 6 |
| 1122 | 1122_60 | AATCTTATTTACATCTTCC | AAtcTtatttacatCttCC | 10 |
| 1122 | 1122_61 | AATCTTATTTACATCTTCC | AAtcTTatttacatcTtCC | 6 |
| 1122 | 1122_62 | AATCTTATTTACATCTTCC | AatCtTatttacatcTtCC | 3 |
| 1122 | 1122_63 | AATCTTATTTACATCTTCC | AATCttatttacaTcttCC | 5 |
| 1122 | 1122_64 | AATCTTATTTACATCTTCC | AatCttatttacatcTtCC | 7 |
| 1122 | 1122_65 | AATCTTATTTACATCTTCC | AatCttatttacatcttCC | 32 |
| 1122 | 1122_66 | AATCTTATTTACATCTTCC | AatcttatttacatcTTCC | 19 |
| 1122 | 1122_67 | AATCTTATTTACATCTTCC | AATCttatttacatcTtCC | 3 |
| 1122 | 1122_68 | AATCTTATTTACATCTTCC | AATcTtatttacatcTtCC | 4 |
| 1122 | 1122_69 | AATCTTATTTACATCTTCC | AAtCTtatttacatcTtCC | 3 |
| 1122 | 1122_70 | AATCTTATTTACATCTTCC | AAtCtTatttacatcTtCC | 3 |
| 1122 | 1122_71 | AATCTTATTTACATCTTCC | AAtcTtatttacatcTtCC | 13 |
| 1122 | 1122_72 | AATCTTATTTACATCTTCC | AaTCttatttacatcTtCC | 5 |
| 1122 | 1122_73 | AATCTTATTTACATCTTCC | AatCTtatttacatcTtCC | 5 |
| 1122 | 1122_74 | AATCTTATTTACATCTTCC | AatctTatttacatcTtCC | 10 |
| 1122 | 1122_75 | AATCTTATTTACATCTTCC | AAtCTtatttacatctTCC | 3 |
| 1122 | 1122_76 | AATCTTATTTACATCTTCC | AAtCttatttacatctTCC | 5 |
| 1122 | 1122_77 | AATCTTATTTACATCTTCC | AaTCttatttacatctTCC | 5 |
| 1122 | 1122_78 | AATCTTATTTACATCTTCC | AatCTtatttacatctTCC | 4 |
| 1122 | 1122_79 | AATCTTATTTACATCTTCC | AAtCTtatttacatcttCC | 7 |
| 1122 | 1122_80 | AATCTTATTTACATCTTCC | AAtCtTatttacatcttCC | 5 |
| 1122 | 1122_81 | AATCTTATTTACATCTTCC | AatCtTatttacatcttCC | 8 |
| 1109 | 1109_43 | TGAAACCATTACTACAACC | TgAAaccattacTAcAaCC | 18 |
| 1109 | 1109_44 | TGAAACCATTACTACAACC | TgAaAccattacTacAaCC | 27 |
| 1109 | 1109_45 | TGAAACCATTACTACAACC | TgaAaCcattacTacAaCC | 65 |
| 1109 | 1109_46 | TGAAACCATTACTACAACC | TgAaaccattacTacaACC | 25 |
| 1109 | 1109_47 | TGAAACCATTACTACAACC | TgaAaccattacTacaACC | 35 |
| 1109 | 1109_48 | TGAAACCATTACTACAACC | TgaaAccattacTacaACC | 48 |
| 1109 | 1109_49 | TGAAACCATTACTACAACC | TgaAaCcattacTacaaCC | 44 |
| 1109 | 1109_50 | TGAAACCATTACTACAACC | TgaAaccattacTaCaaCC | 34 |
| 1109 | 1109_51 | TGAAACCATTACTACAACC | TGaaaccattacTacaACC | 29 |
| 1109 | 1109_52 | TGAAACCATTACTACAACC | TgAAaccattacTacaACC | 23 |
| 1109 | 1109_53 | TGAAACCATTACTACAACC | TgaaaCcattacTaCaaCC | 39 |
| 1109 | 1109_54 | TGAAACCATTACTACAACC | TGaaaccattactaCaaCC | 33 |
| 1109 | 1109_55 | TGAAACCATTACTACAACC | TgAaAccattactaCaaCC | 29 |
| 1109 | 1109_56 | TGAAACCATTACTACAACC | TGaaAccattactacAACC | 16 |
| 1109 | 1109_57 | TGAAACCATTACTACAACC | TGaaAccattactacAaCC | 18 |
| 1109 | 1109_58 | TGAAACCATTACTACAACC | TgAaACcattactacaaCC | 12 |
| 1109 | 1109_59 | TGAAACCATTACTACAACC | TgAaaccattactaCAaCC | 13 |
| 1109 | 1109_60 | TGAAACCATTACTACAACC | TgaaAccattactACaaCC | 36 |
| 1109 | 1109_61 | TGAAACCATTACTACAACC | TGaaaccattactAcaACC | 34 |
| 1109 | 1109_62 | TGAAACCATTACTACAACC | TgAaaCcattactACaaCC | 43 |
| 1109 | 1109_63 | TGAAACCATTACTACAACC | TGaAAccattactaCaaCC | 19 |
| 1109 | 1109_64 | TGAAACCATTACTACAACC | TGaaaCcattactACaaCC | 29 |
| 1109 | 1109_65 | TGAAACCATTACTACAACC | TGaAaccattactAcaaCC | 40 |
| 1109 | 1109_66 | TGAAACCATTACTACAACC | TgaAAccattactAcAACC | 14 |
| 1109 | 1109_67 | TGAAACCATTACTACAACC | TGaAaccattactAcAaCC | 14 |
| 1109 | 1109_68 | TGAAACCATTACTACAACC | TGaaaCcattactAcAaCC | 27 |
| 1109 | 1109_69 | TGAAACCATTACTACAACC | TgAaaCcattactAcAACC | 31 |
| 1109 | 1109_70 | TGAAACCATTACTACAACC | TgAaAccattactAcAaCC | 24 |
| 1109 | 1109_71 | TGAAACCATTACTACAACC | TgaaACcattactacAACC | 10 |
| 1109 | 1109_72 | TGAAACCATTACTACAACC | TGAaaccattactacAaCC | 11 |
| 1109 | 1109_73 | TGAAACCATTACTACAACC | TgaAACcattactAcAaCC | 34 |
| 1109 | 1109_74 | TGAAACCATTACTACAACC | TGaAaCcattactacaACC | 15 |
| 1109 | 1109_75 | TGAAACCATTACTACAACC | TGaaACcattactacaaCC | 14 |
| 1109 | 1109_76 | TGAAACCATTACTACAACC | TGaAaccattactaCaaCC | 22 |
| 1109 | 1109_77 | TGAAACCATTACTACAACC | TgaAAccattactaCaaCC | 30 |
| 1109 | 1109_78 | TGAAACCATTACTACAACC | TgaaAccattactaCaaCC | 50 |
| 1109 | 1109_79 | TGAAACCATTACTACAACC | TgaAACcattactacAaCC | 9 |
| 1109 | 1109_80 | TGAAACCATTACTACAACC | TGaAaccattactacaaCC | 31 |
| 1109 | 1109_81 | TGAAACCATTACTACAACC | TgAaaCcattactacaaCC | 31 |

In the oligonucleotide compound column, capital letters represent beta-D-oxy LNA nucleosides, LNA cytosines are 5-methyl cytosine, lower case letters are DNA nucleosides, and all internucleoside linkages are phosphorothioate.

### Example 5: Testing In Vitro Efficacy of LNA Oligonucleotides in iCell® GlutaNeurons at

[0338] 25 μM

### Materials and Methods:

[0339] An oligonucleotide screen was performed in a human cell line using selected LNA oligonucleotides from the previous examples.

[0340] The iCell® GlutaNeurons derived from human induced pluripotent stem cell were purchased from the vendor listed in Table 2, and were maintained as recommended by the supplier in a humidified incubator at 37° C. with 5% CO₂. For the screening assays, cells were seeded in 96 multi well plates in media recommended by the supplier (see Table 2 in the Materials and Methods section). The number of cells/well was optimized (Table 2).

[0341] Cells were grown for 7 days before addition of the oligonucleotide in concentration of 25 μM (dissolved in medium). 4 days after addition of the oligonucleotide, the cells were harvested.

[0342] RNA extraction and qPCR was performed as described for “Example 1”

[0343] Primer assays for ATXN3 and house keeping gene were:

ATXN3 primer assay (Assay ID: N/A, Item Name: Hs.PT.58.39355049):

Forward primer:
(SEQ ID NO: 1128)
GTTTCTAAAGACATGGTCACAGC
Reverse:
(SEQ ID NO: 1129)
CTATCAGGACAGAGTTCACATCC
Probe:
(SEQ ID NO: 1130)
56-FAM/AAAGGCCAG/ZEN/CCACCAGTTCAGG/3IABkFQ/

TBP primer assay (Assay ID: N/A Item name: Hs.PT.58v. 39858774

Probe:
(SEQ ID NO: 1131)
5′- /5HEX/TGA TCT TTG /ZEN/CAG TGA CCC AGC ATC A/
3IABkFQ/ -3′
Primer 1:
(SEQ ID NO: 1132)
5′- GCT GTT TAA CTT CGC TTC CG-3′
Primer 2:
(SEQ ID NO: 1133)
5′- CAG CAA CTT CCT CAA TTC CTT G-3′

### Results:

[0344] The relative ATXN3 mRNA expression levels were determined as % of control (medium-treated cells) i.e. the lower the value the larger the inhibition.

[0345] The compounds tested and the target knock-down data is presented in Table 7.

### Example 6: Determination of EC50 Values of LNA Gapmers Targeting ATXN3

### Materials and Methods:

[0346] Values for EC50 (concentration at which half effect on target knockdown is observed) was determined for the cell lines SK-N-AS, A431 and iPSCs (iCell® GlutaNeurons). The following oligoconcentrations were used:
[0347] SK-N-AS: 50 μM—half log dilution (3.16 fold)—8 steps including blank control
[0348] A431: 50 μM—half log dilution (3.16 fold)—8 steps including blank control
[0349] iPCS: 10 μM—10 fold dilution—8 steps including blank control

[0350] The cells were treated with oligo, lysed and analysed as indicated in previous examples.

### Results:

[0351] The compounds tested and their EC50 values is shown in table 7.

### Example 7: In Vitro Toxicity Evaluation

### Materials and Methods:

[0352] The criterion for selection of oligonucleotides assessed in the various safety assays is based on the magnitude and frequency of signals obtained. Safety assays used were: Caspase activation, hepatotoxicity, nephrotoxicity toxicity and immunotoxicity assays. The signals obtained in the individual in vitro safety assays result in a score (0—safe, 0.5 borderline toxicity, 1—mild toxicity, 2—medium toxicity and 3—severe toxicity) and are summarized into a cumulative score for each sequence (See table 7), providing an objective ranking of compounds. As reported in the references provided, the signal strength is a measure of risk for in vivo toxicity based on validation of the assays using in vivo relevant reference molecules

[0353] In vitro toxicity assays were performed as described in the following references: Caspase activation assay: Dieckmann et al., Molecular Therapy: Nucleic Acids Vol. 10 Mar. 2018, pp 45-54.

[0354] Hepatotoxicity toxicity assay: Sewing et al., Methods in Molecular Biology Oligonucleotide-Based Therapies MIMB, volume 2036, pp 249-259 2019, Sewing et al., PLOS ONE|DOI:10.1371/journal.pone.0159431 Jul. 21, 2016.

[0355] Nephrotoxicity toxicity assay: Moisan et al., Mol Ther Nucleic Acids. 2017 Mar. 17; 6:89-105. doi: 10.1016/j.omtn.2016.11.006. Epub 2016 Dec. 10.

[0356] Immunotoxicity: Sewing et al., PLoS One. 2017 Nov. 6; 12(11):e0187574. doi: 10.1371/journal.pone.0187574. eCollection 2017.

[0357] As part of the screening cascade 1170 compounds were evaluated in the cell lines SK-N-AS and A431 where compound efficacy was evaluated (Tables 4-6). Of these, 50 of the most effective compounds were evaluated for caspase activation of which 18 underwent further evaluation in the described in the three other in vitro tox assays (cumulative score is shown in Table 7).

### Results:

[0358] Conclusively, 8 compounds were identified as being highly effective and potent in vitro, and with a low or absent toxicity in the 4 in vitro assays—these compounds were therefore selected for evaluated in transgenic mice expressing human ATNX3 pre-mRNA: Compounds #1856_1, 1813_1, 1812_1, 1809_2, 1607_1, 1122_62, 1122_67 and 1122_33.

TABLE 7
Data obtained from Examples 5, 6 & 7

| | | | | | HiPCS, |
|---|---|---|---|---|---|
| | | | | | Maximal |
| | | | | | efficacy at |
| | | | | | 25 μM (% |
| | Total | SK-N-AS | A-431 | HiPSC | remaining |
| | tox | EC50 | EC50 | EC50 | ATXN3 |
| CMPID | score | (μM) | (μM) | (μM) | transcript) |
| 1856_1 | 1.5 | 0.53 | 0.22 | 0.23 | 2.87 |
| 1806_2 | 2 | 0.35 | 0.19 | 0.03 | 0.91 |
| 1888_1 | — | 0.72 | 0.54 | — | — |
| 1813_1 | 2 | 0.24 | 0.08 | 0.04 | 1.85 |
| 1640_1 | — | 1.50 | 0.19 | — | — |
| 1812_1 | 1.5 | 0.20 | 0.09 | 0.09 | 0.59 |
| 1117_2 | — | 0.73 | 0.57 | — | — |
| 1810_1 | — | 0.36 | 0.14 | — | — |
| 1809_2 | 1.25 | 0.22 | 0.09 | 0.05 | 1.44 |
| 1489_1 | — | 1.16 | 0.30 | — | — |
| 1867_1 | — | 0.54 | 0.50 | — | — |
| 1893_1 | — | 0.95 | 0.34 | 0.41 | 4 |
| 1906_1 | — | 0.36 | 0.57 | 0.04 | 2.55 |
| 1214_1 | — | 1.05 | 0.38 | — | — |
| 1213_1 | — | 1.01 | 0.38 | — | — |
| 1423_1 | — | 0.75 | 0.23 | 0.03 | 3.58 |
| 1790_1 | — | 0.42 | 0.47 | — | — |
| 1605_1 | — | 0.47 | 0.17 | — | — |
| 1607_1 | 2.5 | 0.32 | 0.25 | 0.08 | 4.46 |
| 1805_1 | — | 0.75 | 0.23 | — | — |
| 1806_1 | — | 0.45 | 0.20 | 0.04 | 1.3 |
| 1809_1 | 3 | 0.24 | 0.20 | 0.02 | 1.81 |
| 1808_1 | 2 | 0.26 | 0.22 | 0.06 | 1.4 |
| 1625_1 | 0.5 | 0.94 | 0.25 | 0.66 | 7.16 |
| 1122_54 | — | 0.62 | 0.15 | — | — |
| 1122_16 | — | 0.30 | 0.15 | — | — |
| 1122_17 | — | 0.33 | 0.17 | 0.11 | 1.07 |
| 1122_62 | 0.5 | 0.21 | 0.10 | 0.03 | 3.53 |
| 1122_19 | — | 0.28 | 0.24 | — | — |
| 1122_23 | — | 0.54 | 0.18 | 0.05 | 0.59 |
| 1122_67 | 0 | 0.29 | 0.10 | 0.01 | 0.52 |
| 1122_68 | — | 0.28 | 0.13 | 0.01 | — |
| 1122_69 | — | 0.27 | 0.12 | — | — |
| 1122_70 | — | 0.20 | 0.10 | — | — |
| 1122_27 | 1 | 0.23 | 0.12 | 0.03 | 0.55 |
| 1122_72 | 0.5 | 0.25 | 0.15 | 0.06 | 2.28 |
| 1122_28 | 1 | 0.20 | 0.12 | 0.01 | 0.37 |
| 1122_29 | — | 0.19 | 0.09 | 0.02 | 1.6 |
| 1122_73 | — | 0.29 | 0.18 | 0.04 | 1.59 |
| 1122_75 | 1 | 0.44 | 0.12 | 0.03 | 2 |
| 1122_76 | — | 0.33 | 0.19 | — | — |
| 1122_77 | 1 | 0.30 | 0.20 | 0.04 | 1.97 |
| 1122_78 | — | 0.29 | 0.18 | 0.02 | 1.91 |
| 1122_33 | 1.25 | 0.18 | 0.10 | 0.02 | 1.84 |
| 1122_37 | — | 0.25 | 0.13 | 0.03 | 0.89 |
| 1122_80 | — | 0.33 | 0.17 | — | — |
| 1122_41 | — | 0.24 | 0.16 | 0.01 | 0.47 |
| 1109_22 | — | 0.90 | 0.23 | 0.11 | 8.41 |
| 1109_32 | 0 | 0.75 | 0.17 | 0.09 | 3.49 |
| 1109_79 | — | 1.48 | 0.20 | — | — |

### Example 8: In Vivo Transgenic Mouse Study

### Materials and Methods:

[0359] Animal Care

[0360] In vivo activity and tolerability of the compounds were tested in 10-13 week old B6; CBA-Tg(ATXN3*)84.2Cce/IbezJ male and female mice (JAX® Mice, The Jackson Laboratory) housed 3-5 per cage. The mice are transgenic mice which express the human ATXN3 pre-mRNA sequence, with 84 CAG repeats motif, an allele which is associated with MJD in humans). Animals were held in colony rooms maintained at constant temperature (22±2° C.) and humidity (40+80%) and illuminated for 12 hours per day (lights on at 0600 hours). All animals had ad libitum access to food and water throughout the studies. All procedures are performed in accordance with the respective Swiss regulations and approved by the Cantonal Ethical Committee for Animal Research.

[0361] Administration Route—Intra-Cisterna Magna Injections.

[0362] The compounds were administered to mice by intra cisterna magna (ICM) injections. Prior to ICM injection the animals received 0.05 mg/kg Buprenorphine dosed sc as analgesia. For the ICM injection animals were placed in isofluran. Intracerebroventricular injections were performed using a Hamilton micro syringe with a FEP catheter fitted with a 36 gauge needle. The skin was incised, muscles retracted and the atlanto-occipital membrane exposed. Intracerebroventricular injections were performed using a Hamilton micro syringe with a catheter fitted with a 36 gauge needle. The 4 microliter bolus of test compound or vehicle was injected over 30 seconds. Muscles were repositioned and skin closed with 2-3 sutures. Animals were placed in a warm environment until they recovered from the procedure. 2 independent experiments were performed with groups of different compounds as shown in Table 8A.

TABLE 8A

| Compound ID | Dose, μg | Time-point | Group Size |
|---|---|---|---|
| Saline only | 0 | 4 wk | 6 |
| 1856_1 | 250 | 4 wk | 8 |
| 1813_1 | 250 | 4 wk | 8 |
| 1812_1 | 250 | 4 wk | 8 |
| 1809_2 | 250 | 4 wk | 8 |
| 1607_1 | 250 | 4 wk | 8 |
| 1122_62 | 250 | 4 wk | 8 |
| 112267 | 250 | 4 wk | 8 |
| 112233 | 250 | 4 wk | 8 |

[0363] Tolerability Results:

[0364] All compounds were found to be tolerated up to the 4 weeks timepoint. Acute toxicity was measured by monitoring the animal's behavior as described in WO2016/126995 (see example 9). Sub-acute toxicity was measured by monitoring the body weight of each animal during the time course of the experiment, with >5% weight reduction indicative of sub-acute toxicity. In some groups 1 or 2 animals did show some distress after the ICM administration and were euthanized, but this was likely to be due to the procedure rather than a adverse toxicity of any of the compounds. All eight compounds were therefore considered to be well tolerated in vivo.

[0365] 4 weeks post administration, the animals were sacrificed, and tissues from the cortex, midbrain, cerebellum, hippocampus pons/medulla and striatum were collected weighed and snap frozen in liquid N2 directly after sampling. Samples were stored on dry ice until storage at −80° C.

[0366] Analysis of In Vivo Samples. Description of Tissue Preparation for Content Measurement and qPCR.

[0367] Mouse tissue samples were homogenized in the MagNA Pure LC RNA Isolation Tissue Lysis Buffer (Roche, Indianapolis, Ind.) using a Qiagen TissueLyzer II. The homogenates were incubated for 30 minutes at room temperature for complete lysis. After lysis the homogenates were centrifuged for 3 minutes at 13000 rpm and the supernatant used for analysis. Half was set aside for bioanalysis and for the other half, RNA extraction was continued directly.

[0368] Oligo Content Analysis

[0369] For bioanalysis, the samples were diluted 10-50 fold for oligo content measurements with a hybridization ELISA method. A biotinylated LNA-capture probe and a digoxigenin-conjugated LNA-detection probe (both 35 nM in 5×SSCT, each complementary to one end of the LNA oligonucleotide to be detected) was mixed with the diluted homogenates or relevant standards, incubated for 30 minutes at RT and then added to a streptavidine-coated ELISA plates (Nunc cat. no. 436014).

[0370] The plates were incubated for 1 hour at RT, washed in 2×SSCT (300 mM sodium chloride, 30 mM sodium citrate and 0,05% v/v Tween-20, pH 7.0) The captured LNA duplexes were detected using an anti-DIG antibodies conjugated with alkaline phosphatase (Roche Applied Science cat. No. 11093274910) and an alkaline phosphatase substrate system (Blue Phos substrate, KPL product code 50-88-00). The amount of oligo complexes was measured as absorbance at 615 nm on a Biotek reader.

[0371] Data was normalized to the tissue weight and expressed as nM of oligo.

[0372] mRNA Analysis

[0373] RNA was purified from 350 μL of supernatant using the MagNA Pure 96 instrument using the kit Cellular RNA Large Volume Kit (Roche, Indianapolis, Ind.). RNA samples were normalized to 2 ng/μL in RNase-Free water and stored at −20° C. until further use.

[0374] For one-step qPCR (cDNA synthesis and qPCR), each sample was run in duplicates with four probe sets (IDT, Leuven, Belgium) run in duplex.

[0375] To each reaction 4 μL of previously diluted RNA, 0.5 μL of water and 5.5 μL of TaqMan MasterMix was added. Plates were centrifuged and heat-chocked at 90° C. for 40 sek followed by a short incubation on ice before analyzing the samples using qPCR (Incubation at 50° C. for 15 minutes and 90° C. for 3 minutes followed by 40 cycles at 95° C. for 5 sec and 60° C. for 45 sec). Assay probes are described below.

[0376] Data was analyzed using the relative standard curve method where each is first normalized to the housekeeping gene (RPL4) and then expressed as percent of untreated control animals.

qPCR assays for in vivo studies:
Human ATXN3, qPR assay: (ATXN3_exon_8-9(1) PrimeTime® XL qPCR Assay (IDT). qPCR probe and primers:

Probe:
(SEQ ID NO: 1134)
5′-/56-FAM/CTCCGCAGG/ZEN/GCT ATTCAGCT AAGT /
31ABkFQ/-3′
Primer 1:
(SEQ ID NO: 1135)
5′-AGT AAGATTTGT ACCTGATGTCTGT-3′
Primer 2:
(SEQ ID NO: 1136)
5′-CATGGAAGATGAGGAAGCAGAT-3′

House keeping gene used:
Mouse RPL4, qPCR assay (Mm.PT.58.17609218) PrimeTime® XL qPCR Assay (IDT).
qPCR probe and primers:

Probe:
(SEQ ID NO: 1090)
5′- /5HEX/CTG AAC AGC /ZEN/CTC CTT GGT CTT CTT
GTA /3IABkFQ/-3′
Primer 1:
(SEQ ID NO: 1091)
5′- CTT GCC AGC TCT CAT TCT CTG-3′
Primer 2:
(SEQ ID NO: 1092)
5′- TGG TGG TTG AAG ATA AGG TTG A-3′

### Results:

[0377] The results are shown in Table 8B.

[0378] All compounds tested gave efficacious target inhibition in the tissues tested and were tolerated at the doses tested. Compound 1122_33 across the compounds tested has either the best or second ranked highest specific activity (lower EC50) in all tissues, followed by 1122_62 and 1122_67.

[0379] Compounds 1122_67, 1607_1, 1813_1 and 1122_33 provided high efficacy in vivo in all tissues tested, illustrating a remarkable consistent inhibition of ATXN3 expression across the brain tissues tested. Based on an accumulative rank score compound 1122_67 was consistently either the best or second ranked compound in terms of efficacy of ATXN3 knock down in the tissues tested.

### Example 9: Testing In Vitro Efficacy of LNA Oligonucleotides and Reference Compounds in a Time Course, Dose Range Experiment in Human iPSC-Derived Neurons

### Materials and Methods:

[0380] Compounds used: 1122_67 and 1813_1 & the following reference compounds disclosed in WO2019/217708, as referenced by the Compound ID numbers used in WO2019/217708: 1100673, 1101657, 1102130, 1103014 & 1102987. Compounds 1100673, 1101657, 1102130 are highlighted in WO2019/217708 as providing potent in vivo inhibition, compounds 1103014 and 1102987 were not evaluated in vivo in WO2019/217708, but are included as reference compounds due to the sequence similarity to compound 1122_67 (1103014) and 1813_1 (1102987).

[0381] The iCell® GlutaNeurons cells were prepared and maintained as described in Example 5 & Table 2. Cells were grown for 7 days before addition of the oligonucleotide in concentration of 0-10 μM (dissolved in medium).

[0382] Cells were harvested at 4 days, 6 days, 9 days, 12 days and 20 days after oligo treatment, and RNA extraction and qPCR was performed as described for “Example 1”, using the ATXN3 primary assay described in Example 5. The relative ATXN3 mRNA expression levels were determined as % of control (medium-treated cells) i.e. the lower the value the larger the inhibition. Results:

[0383] The results are shown in Table 9.

TABLE 9

| | EC50 in hiPSC-derived neurons, nM | | | | |
|---|---|---|---|---|---|
| Compound | Day 4 | Day 6 | Day 9 | Day 12 | Day 20 |
| 1122_67 | 7.2 | 1.3 | 1.4 | 1.1 | 1.1 |
| 1813_1 | 23 | 6.3 | 10 | 8.9 | 7.7 |
| 1100673 | 110 | 27 | 30 | 34 | 44 |
| 1101657 | 515 | 204 | 69 | 90 | 73 |
| 1102130 | 315 | 164 | 390 | 101 | 133 |
| 1103014 | 662 | 64 | 435 | 98 | 369 |
| 1102987 | 944 | 305 | 135 | 391 | 200 |

Compounds 1122_67 and 1813_1 were remarkably more potent than the 5 reference compounds, with compound 112267 being the most potent compound at all time points and both 1122_67 and 1813_1 gave a remarkably effective and long lasting inhibition of ATXN3 mRNA.

### Example 10: Comparative In Vivo Transgenic Mouse Study

### Materials and Methods:

[0384] A further in vivo study was performed at Charles River Laboratories Den Bosch B.V., Groningen, NL, using compound 1122_67 and 1813_1, and reference compound 1100673 (WO2019/217708). The study used male and female B6; CBA-Tg(ATXN3*)84.2Cce/IbezJ mice with the compounds administered via intracisternal (ICM) administration. At two timepoints after compound administration, 1 or 4 weeks, animals were euthanized and terminal plasma samples and tissues were collected.

[0385] Animal Care

[0386] In vivo activity and tolerability of the compounds were tested in 62 B6; CBA-Tg(ATXN3*)84.2Cce/IbezJ male and female mice (JAXR Mice, The Jackson Laboratory) at the age between 7-10 weeks. Following arrival, animals were housed in groups up to 5 in individually vented cages (IVC, 40×20×16 cm) in a temperature (22±2° C.) and humidity (55±15%) controlled environment on a 12 hour light cycle (07.00-19.00 h). Males and females were kept in separate cages. Standard diet (SDS Diets, RM1 PL) and domestic quality mains water were available ad libitum. If required, animals received soaked chow and/or Royal Canin in addition to Standard diet as part of pamper care. The experiments were conducted in strict accordance with the Guide for the Care and Use of Laboratory Animals (National Research Council 2011) and were in accordance with European Union directive 2010/63 and the Dutch law. The in vivo experiment described was performed at Charles River Laboratories Den Bosch B.V. location Groningen (Groningen, the Netherlands).

[0387] Administration Route—Intra-Cisterna Magna Injections.

[0388] The compounds were administered to mice by intra cisterna magna (ICM) injections. Mice were anesthetized using isoflurane (2.5-3% and 500 mL/min 02). Before surgery, Finadyne (1 mg/kg, s.c.) was administered for analgesia during surgery and the post-surgical recovery period. A mixture of bupivacaine and epinephrine was applied to the incision site and periost of the skull for local analgesia.

[0389] Animals were placed in a stereotaxic frame (Kopf instruments, USA) and an incision made at the back of the head towards the neck. Then, the skin was spread and the coordinates marked prior to drilling a hole in the occipital bone of the skull, where a cannula was placed. Next, the compounds were injected into the cistema magna (ICM). A volume of 4 μL of the assigned test item was injected over 30 seconds. After injection, the needle and cannula were held in place for 30 seconds to ensure no back flow occurred. The cannula was then retracted, the hole was covered with skin and the incision was closed by sutures.

[0390] Animals were placed in a warm environment until recovered from the procedure.

[0391] Compound 1122_67 was administered at a single dose of 90, 150 or 250 μg, and compound 1813_1 was administered at a single dose of 150 μg or 250 μg. The reference compound 1100673 was administered at a single dose of 250 μg only.

[0392] From three days prior to ICM injections, up to one week after administration, animal's weight was registered daily. Animal's weight was monitored and registered at least twice a week for the rest of the experiment.

[0393] At the end of the experiment, on day 8 or 29 (1 or 4 weeks), the animals were euthanized by Euthasol® overdose. Terminal plasma was collected in Li-Hep tubes. Terminal tissues were harvested from the animals and were dissected on a chilled surface. Half of the tissue samples were stored in 2.0 mL Safe-Lock tubes, PCR clean, pre-weighted and precooled. Immediately after collection, samples were weighed and flash frozen in liquid N2 prior to storage at −80° C. The other half was fixed in 4% PFA for 72 hours and subsequently transferred to 70% ethanol awaiting shipment. Tissue dissection and collection was performed, collecting tissue from a range of tissues: Midbrain, Cortex, Striatum, Hippocampus, Cerebellum, Brainstem, and spinal cord (Cervical, Thoracic & Lumbar).

[0394] Tolerability Results:

[0395] Acute toxicity was measured by monitoring the animal's behavior as described in WO2016/126995 (see Example 9). Chronic toxicity was measured by monitoring the body weight of each animal during the time course of the experiment, with >5% weight reduction indicative of chronic toxicity. In some groups 1 or 2 animals did show some distress after the ICM administration and were euthanized, but this was likely to be due to the nature of the surgical procedure rather than a adverse toxicity of any of the compounds.

[0396] There were signs of acute toxicity at the 250 μg dose of 18131 in 3 mice, leading to early euthanisation of this group of animals. Otherwise all compounds were found to be tolerated up to the 4 weeks timepoint.

[0397] After 4 weeks the animals were euthanised and brain and CNS tissue collected: Spinal cord, cortex, striatum, hippocampus, midbrain, brainstem and cerebellum as well as liver and kidney was collected in liquid nitrogen for drug concentration analysis an ATAXN3 mRNA analysis at 1 or 4 weeks following dosing.

Analysis of in vivo samples: Description of tissue preparation for content measurement and qPCR was performed as per Example 8. The EC50 was calculated, and maximum KD achieved recorded—this data is provided in Table 10.

### Results:

[0398] Compound 1122_67 was the most effective compound in all brain tissues tested and gave an excellent effective knock-down in all brain tissues tested, indicating good bio-distribution to all key tissues (1813_1 was as effective as 112267 in spinal cord, brainstem and midbrain). Notably compound 1122_67 gave highly effective knock-down in cerebellum, a tissue which the reference compound 1100673 was notably less effective. A further key observation at the after 4 weeks of treatment is that the efficacy of 1122_67 was even further improved as compared to the 1 week timepoint in all brain tissues. Notably, the efficacy of the reference compound, 1100673 was notably lower at the 4 week stage vs. the 1 week timepoint, particularly in key cerebellum and cortex tissues. The long duration of action and high potency of 1122_67 indicates that this compound should require a less frequent administration in a therapeutic setting.

### Example 11: Compound Stability to SVPD

### Materials and Methods:

[0399] 3′-exonuclease snake venom phosphodiesterase I (SVP) (Art. No. LS003926, Lot. No. 58H18367) was purchased by Worthington Biochemical Corp. (Lakewood, N.Y., USA). The reaction mix for the 3′-exonuclease snake venom phosphodiesterase I (SVP) assay consisted of 50 mM TRIS/HCl pH 8 buffer, 10 mM MgCl2, 30 U CIP (NEB, Ipswich, Mass., USA), 0.02 U SVP and the oligonucleotide compound. The stability of the ASOs against SVPD was determined by performing the nuclease assays over a one day time course. In each reaction mix an amount about 0.2 mg/mL ASO in a totally volume of 150 μl was used.

[0400] The incubation period of 24 h at 37° C. was performed on an autosampler, the SVPD and reactions and the ASO stabilities were monitored in time intervals by an UHPLC system equipped with a diode-array detector and coupled with electrospray ionization-time of flight-mass spectrometry (ESI-ToF-MS). To generate the t=0 h time point, the enzyme was added into the reaction mix, directly before the first injection. Further injections took place at regular intervals over a period of 24 hours.

[0401] Compounds tested, 1122_67, 1813_1 and the reference compounds 1100673, 1101657, 1102130, 1103014, and 1102987.

### Results:

[0402] The data is illustrated in FIG. 9. Whilst the three highlighted reference compounds from WO2019/217708 and the 1122_67 and 1813_1 compounds had good stability in the SVPD assay, the 2 reference compounds from WO2019/217708 with the closest sequence to 1122_67 and 1813_1, compounds 1103014 and 1102987 were notably more vulnerable to SVPD degradation as compared to 1122_67 and 1813_1.

### Example 12: WT and polyQ Ataxin 3 Protein Levels in Human SCA3 Patient Derived Fibroblasts Treated with Selected Oligonucleotides (ASO)

### Materials and Methods:

[0403] This experiment was performed to investigate the efficacy of efficacy of knock down of the LNA oligonucleotides, 1122_67 and 1122_33, as compared to the prior art compounds, 1100673 and 1102130 in SCA3 patient derived fibroblasts, allowing for an assessment of the efficacy on the disease causing ataxin3 allele and the ataxin3 WT allele.

[0404] Cell line used for the ASO treatment, human SCA3 patient derived fibroblasts (GM06153—Coriell Institute). One hundred thousand cells were seeded per well in a 24 well plate with a total volume of 1 ml. ASOs were added immediately after to a final concentration of 10 μM (gymnotic uptake). After 4 days of incubation at, cells were washed twice with PBS, and harvested in 200 μl RIPA buffer (Thermo Scientific, Pierce).

[0405] Western blots were performed on the capillary-based immunoassay platform (WES, ProteinSimple) using a WES 12-230 kDa Wes Separation Module. Cell lysate were diluted 10× in Sample load buffer (ProteinSimple) prior loading on the cartridge. Primary antibody for Ataxin 3 (rabbit monoclonal antibody, prod. #702788 from Invitrogen) and for HPRT (rabbit monoclonal antibody, cat. #Ab109021 from Abcam). Both antibodies were used in 1/100 dilutions. Goat anti-rabbit HRP conjugate (Part. #DM-001, ProteinSimple) was used as secondary antibody.

[0406] Compass software (ProteinSimple) was for quantification of the protein bands.

### Results:

[0407] To show an efficient KD of both the wild type as well as the polyQ extended Ataxin 3 protein, GM06153 cells were treated with 10 μM of ASO for four days prior to protein analysis on the WES. Ataxin 3 antibody recognize both isoforms, and the intensity (area under peak) was normalized to the protein input based on the signal from HPRT. As seen from the FIGS. 10A and B, we observe that upon treatment with 1122_67 and 1122_33, there is an increased reduction in the polyQ extended Ataxin 3 compared to the wild type Ataxin 3. This trend is not observed for the other ASOs (Scrambled control, 1100673 or 1102130) where we observe a higher amount of the polyQ extended Ataxin 3, compared to the wild type Ataxin 3. A higher activity on the disease causing polyQ extended Ataxin 3 than the WT Ataxin 3 is preferable as it allows a selective reduction of the disease causing allele.

### Example 13: In Vitro Efficacy of LNA Oligonucleotides in SK-N-AS and A431 Cells

### Materials and Methods:

[0408] Additional oligonucleotides targeting human ATXN3 pre-mRNA (SEQ ID NO:1) were prepared and tested in in vitro efficacy assay.

[0409] Oligonucleotides

[0410] The additional oligonucleotides are shown in Table 11, where the structure of each compound is described by the hierarchical editing language for macromolecules (HELM) (for details, see Zhang et al., Chem. Inf. Model. 2012, 52, 10, 2796-2806) using the following HELM annotation keys:

[LR](G) is a beta-D-oxy-LNA guanine nucleoside,
[LR](T) is a beta-D-oxy-LNA thymine nucleoside,
[LR](A) is a beta-D-oxy-LNA adenine nucleoside,
[LR]([5meC] is a beta-D-oxy-LNA 5-methyl cytosine nucleoside,
[dR](G) is a DNA guanine nucleoside,
[dR](T) is a DNA thymine nucleoside,
[dR](A) is a DNA adenine nucleoside,
[dR]([C] is a DNA cytosine nucleoside,
[sP] is a phosphorothioate internucleoside linkage (stereo-undefined)
[mR](G) is a 2′-O-methyl guanine nucleoside,
[mR](U) is a 2′-O-methyl uracil nucleoside,
[mR](A) is a 2′-O-methyl adenine nucleoside,
[mR](C) is a 2′-O-methyl cytosine nucleoside.

[0411] As shown in Table 11, all internucleoside linkages were phosphorothioate [sP] linkages.

[0412] More details on selected compounds from Table 11 are provided in Table 12, which shows the base sequence and sugar sequence of the oligonucleotides using the HELM-dictionary shown below (see above for more detailed HELM annotations).

| Base sequence | Sugar sequence |
|---|---|
| A: (A) | D: [dR] |
| C: (C) | L: [LR] |
| E: (5meC) | O: [mR] |
| G: (G) | |
| T: (T) | |

TABLE 12
Selected compounds

| CMP ID | | | |
|---|---|---|---|
| NO | Base sequence | Sugar sequence | FIG. |
| 1605_2 | TETTCATTATACCAT | LLDLDLDDDDDDDD | 11A |
| | EAA | DLLL | |
| 1605_3 | TETTCATTATACCAT | LLDLDDDDDDDDDD | 11B |
| | EAA | DLLL | |
| 1605_4 | TETTCATTATACCAT | LLDLDDDDDDDDDL | 11C |
| | EAA | DLLL | |
| 1605_5 | TETTEATTATACCAT | LLLDLDDDDDDDDD | 11D |
| | EAA | LLLL | |
| 1605_23 | TETTEATTATACCAT | LLDDLDDDDDDDDL | 11E |
| | CAA | LDLL | |
| 1809_8 | GTACACTTTTACATT | LLDDLDDDDDDDLD | 11F |
| | CEE | DDLL | |
| 1810_39 | TACACTTTTACATTC | LLDLDLDDDDDDDL | 11G |
| | EE | DLL | |
| 1812_4 | TGTACACTTTTACAT | LLDDDDDLDDDDDD | 11H |
| | TEE | DLLL | |
| 1813_4 | ETGTACACTTTTACA | LLLDDDLDDDDDDD | 11I |
| | TTE | DLLL | |
| 1813_15 | ETGTACACTTTTACA | LLLDDOODDDDDDD | 11J |
| | TTE | DLLL | |
| 1813_16 | ETGTACACTTTTACA | LLLDDODODDDDDD | 11K |
| | TTE | DLLL | |

[0413] In Vitro Assay

[0414] The oligonucleotides in Table 11 were tested for their ability to reduce ATXN3 mRNA expression in human SK-N-AS neuroblastoma cells and A-431 cells using the screening assay and primer sequences described in Example 2. See Table 2 for information on the cell lines.

[0415] Briefly, SK-N-AS cells were seeded at 9000 cells/well and A-431 cells at 7000 cells/well in 96-well plates in 190 μl cell culture media. After 24 hours in culture, 10 μl of oligonucleotide suspensions was added to the cell plates from pre-made 96-well dilution plates (compound diluted in PBS), to reach the predetermined final concentration, which was 1.5 μM for SK-N-AS cells and 1 μM or 0.5 μM for A-431 cells. Both cell lines were incubated with oligonucleotides for 72 hours before lysis.

### Results:

[0416] The results are presented in Table 11. The values shown represent the mean percentage of remaining ATXN3 mRNA as compared to control (PBS). Accordingly, a higher knockdown is indicated by a lower value of remaining mRNA, i.e., the lower the value, the higher the inhibition. It was observed that the oligonucleotide-mediated knockdown of ATXN3 mRNA was generally more efficacious in the A-431 cell line. It was also observed that the efficacies of the compounds ranged from almost complete target knock-down to no effect on the target mRNA.

### Example 14: Determining EC50 Values for Selected Compounds in SK-N-AS Cells, A-431 Cells and iCell Glutaneurons, and In Vitro Toxicity

### Materials and Methods:

[0417] Selected compounds identified in Example 13 were evaluated by the assays described in Example 5 and Example 6. The most effective of these compounds were then subjected to in vitro toxicity evaluation according to Example 7.

### Results:

[0418] The results are shown in Table 13.

TABLE 13

| | Total | SK-N-AS | A431 | hiPSC |
|---|---|---|---|---|
| | toxicity | EC50 | EC50 | EC50 |
| CMP ID NO | score | (μM) | (μM) | (μM) |
| 1117_19 | — | 0.314 | 0.116 | 0.164 |
| 1122_432 | — | 0.33 | 0.22 | — |
| 1122_455 | — | 0.358 | 0.176 | — |
| 1122_456 | — | 0.327 | 0.184 | — |
| 1122_470 | 2 | 0.149 | 0.0741 | 0.0242 |
| 1122_481 | — | 0.14 | 0.0689 | 0.0157 |
| 1122_482 | 3 | 0.175 | 0.0685 | 0.012 |
| 1122_484 | 3 | 0.137 | 0.0556 | 0.011 |
| 1122_492 | — | 0.174 | 0.0797 | — |
| 1123_5 | 2 | 0.271 | 0.0785 | 0.192 |
| 1604_5 | — | 0.217 | 0.134 | 0.0317 |
| 1604_19 | — | 0.385 | 0.41 | — |
| 1604_50 | — | 0.276 | 0.188 | — |
| 1604_56 | — | 0.222 | 0.0945 | — |
| 1605_2 | 1 | 0.17 | 0.108 | 0.00616 |
| 1605_3 | 1.5 | 0.166 | 0.105 | 0.0237 |
| 1605_4 | 2 | 0.182 | 0.0947 | 0.0257 |
| 1605_5 | 1 | 0.304 | 0.075 | 0.0558 |
| 1605_10 | — | 0.266 | 0.103 | — |
| 1605_13 | — | 0.172 | 0.0816 | — |
| 1605_14 | 1.5 | 0.226 | 0.18 | 0.0501 |
| 1605_15 | — | 0.223 | 0.131 | — |
| 1605_23 | 1 | 0.179 | 0.116 | 0.00763 |
| 1605_30 | — | 0.271 | 0.179 | — |
| 1605_39 | — | 0.294 | 0.211 | — |
| 1605_47 | 3 | 0.14 | 0.0691 | 0.0113 |
| 1605_48 | — | 0.196 | 0.104 | — |
| 1606_12 | — | 0.269 | 0.206 | — |
| 1606_19 | — | 0.301 | 0.288 | — |
| 1606_30 | — | 0.3 | 0.204 | — |
| 1606_32 | — | 0.26 | 0.16 | — |
| 1606_35 | — | 0.257 | 0.17 | — |
| 1606_36 | 2.5 | 0.208 | 0.14 | 0.0179 |
| 1606_37 | — | 0.274 | 0.239 | — |
| 1606_40 | — | 0.265 | 0.147 | — |
| 1808_8 | — | 0.264 | 0.318 | — |
| 1808_10 | — | 0.209 | 0.125 | 0.0228 |
| 1808_12 | — | 0.168 | 0.0999 | — |
| 1808_18 | — | 0.223 | 0.132 | — |
| 1808_19 | — | 0.126 | 0.121 | — |
| 1808_21 | 3 | 0.161 | 0.127 | 0.00901 |
| 1809_6 | 2.5 | 0.177 | 0.134 | 0.00879 |
| 1809_8 | 1 | 0.186 | 0.0928 | 0.0152 |
| 1809_9 | — | 0.28 | 0.174 | — |
| 1809_13 | — | 0.221 | 0.152 | — |
| 1809_15 | — | 0.228 | 0.126 | — |
| 1809_16 | — | 0.214 | 0.117 | 0.0137 |
| 1809_20 | — | 0.113 | 0.0741 | 0.00527 |
| 1809_25 | — | 0.146 | 0.108 | — |
| 1809_26 | — | 0.285 | 0.166 | — |
| 1809_28 | — | 0.255 | 0.122 | — |
| 1809_31 | — | 0.14 | 0.0675 | — |
| 1809_34 | — | 0.276 | 0.133 | — |
| 1809_37 | 3 | 0.112 | 0.0584 | 0.0551 |
| 1809_42 | — | 0.2 | 0.0897 | 0.0219 |
| 1809_44 | — | 0.216 | 0.0735 | — |
| 1809_45 | 3.5 | 0.15 | 0.0686 | 0.0334 |
| 1809_46 | 6 | 0.122 | 0.058 | 0.00424 |
| 1809_48 | — | 0.147 | 0.0756 | — |
| 1809_50 | — | 0.151 | 0.0653 | 0.0257 |
| 1809_51 | — | 0.0876 | 0.0403 | — |
| 1809_52 | — | 0.0834 | 0.0431 | 0.0102 |
| 1809_60 | — | 0.168 | 0.097 | — |
| 1809_62 | 5 | 0.183 | 0.0629 | 0.00381 |
| 1810_6 | 3.5 | 0.205 | 0.117 | 0.00665 |
| 1810_13 | 5 | 0.248 | 0.125 | 0.0104 |
| 1810_18 | 2.5 | 0.0676 | 0.0529 | 0.00654 |
| 1810_22 | 3 | 0.201 | 0.105 | 0.00369 |
| 1810_24 | — | 0.199 | 0.145 | — |
| 1810_39 | 2 | 0.108 | 0.0454 | 0.0151 |
| 1812_2 | 5 | 0.176 | 0.0636 | 0.0221 |
| 1812_3 | 1 | 0.112 | 0.0375 | 0.0281 |
| 1812_4 | 1 | 0.143 | 0.0429 | 0.0949 |
| 1812_5 | — | 0.164 | 0.0549 | — |
| 1812_9 | — | 0.21 | 0.0796 | — |
| 1812_11 | — | 0.209 | 0.0595 | — |
| 1812_13 | 1 | 0.19 | 0.0774 | 0.137 |
| 1812_14 | — | 0.101 | 0.0885 | — |
| 1812_15 | — | 0.0839 | 0.0414 | — |
| 1813_4 | 1 | 0.136 | 0.0481 | 0.0301 |
| 1813_12 | — | 0.225 | 0.0727 | 0.0331 |
| 1813_14 | 1.5 | 0.178 | 0.0603 | 0.0308 |
| 1813_15 | 2 | 0.163 | 0.0615 | 0.0386 |
| 1813_16 | 1 | 0.201 | 0.0456 | 0.054 |
| 1825_3 | 5 | 0.233 | 0.111 | 0.0651 |
| 2022_3 | — | 0.221 | 0.0777 | 0.118 |
| 2032_3 | — | 0.463 | 0.0984 | 0.205 |

### Example 15: In Vivo Evaluation of Compounds in Transgenic Animals

### Materials and Methods:

[0419] Compounds identified in Example 14 as being highly effective and potent in vitro and as having a low or absent toxicity in the in vitro toxicity assays were evaluated in the transgenic mouse model expressing human ATNX3 pre-mRNA described in Example 8.

[0420] The tested compounds are shown in Table 14 together with study parameters. Control animals received saline injections. Compound ID Nos. 1122_67 and 1122_33 were included for comparison.

TABLE 14

| | | Time-point | Group |
|---|---|---|---|
| CMP ID NO | Dose (μg) | (days) | size |
| Saline, study 1 | 0 | 28 | 6 |
| Saline, study 2 | 0 | 28 | 6 |
| Saline, study 3 | 0 | 28 | 8 |
| 1605_2 | 150 | 28 | 8 + 7 |
| 1605_5 | 150 | 28 | 8 |
| 1812_4 | 150 | 28 | 8 |
| 1813_16 | 150 | 28 | 8 |
| 1605_23 | 150 | 28 | 8 |
| 1810_39 | 150 | 28 | 8 |
| 1809_8 | 150 | 28 | 8 |
| 1605_3 | 150 | 28 | 8 |
| 1605_4 | 150 | 28 | 8 |
| 1813_4 | 150 | 28 | 7 |
| 1813_15 | 150 | 28 | 8 |
| 1122_67 | 150 | 28 | 8 + 8 |
| 1122_33 | 150 | 28 | 8 + 8 |

[0421] Details on the animal model and methodology can be found in Example 8. Briefly, the compounds were administered by a single dose of 150 μg using intra cistema magna injection, and the animals were sacrificed and evaluated after 28 days. The animals were monitored for acute and sub-acute toxicity. The in vivo study was divided into three individual experiments with a similar design (study 1, 2 and 3; respectively). Three compounds were included in two of the three identical studies as indicated in the column “Group size.” For Compound ID Nos. 1605_23, 1810_39 and 1809_8, some sub-acute toxicity was observed, resulting in premature termination of the groups. After sacrifice of the animals, the brain regions; cortex, cerebellum, midbrain and pons/medulla were dissected out, weighed and subjected to analysis of remaining target mRNA and oligo content measurement as described in more detail in Example 8.

### Results:

[0422] The results are shown in Table 15. All compounds resulted in efficacious target inhibition in the tissues tested and were tolerated at the dosages used. Notably, Compound ID Nos. 1605_2, 1605_4, 1605_5 and 1605_3 were among the most potent (i.e., low EC50) compounds across the tested brain tissues. Furthermore, Compound 1813_15 showed a high efficacy (max efficacy; lowest remaining target mRNA) and was among the three most efficacious compounds across the tested brain tissues.

### Example 16: In Vitro Efficacy of LNA Oligonucleotides and Reference Compounds in a Time Course, Dose Range Experiment in Human iPSC-Derived Neurons

### Materials and Methods:

[0423] Based on the results described in Example 15, Compound ID Nos. 1605_2, 1605_3, 1605_4, 1605_5 and 1813_15 were selected for evaluation of comparing potency/efficacy over time. Additionally, the oligonucleotide disclosed as Compound No. 1102579 in WO2019/217708 and those disclosed as Compound Nos. 1287095 and 1304862 in WO2020/172559 A1 were included as reference compounds. Specifically, Compound No. 1287095 was disclosed as being potent in vivo; Compound No. 1304862 was included due to its sequence similarity to the present Compound ID No. 1813_15; and Compound No. 1102579 was included due to its sequence similarity to present Compound ID Nos. 16052, 1605_3, 1605_4 and 1605_5.

[0424] The iCell GlutaNeuron cells were prepared and maintained essentially as described in Example 5 & Table 2. 96-well cell culture plates were coated with Poly-L-Omithine (0.01%) (Sigma-P4957), 100 μl/well for 4 hours. Rinsed 3 times with PBS and coated with Laminin (Roche Diagnostic, 11243217001) 0.5 mg/ml diluted 1:500 in PBS overnight at 4 degrees Celsius. The cells were treated and maintained as per recommendation by the vendor using the provided protocol: iCell® GlutaNeurons, User's Guide, Document ID: X1005, Version 1.2, Cellular Dynamics, Fujifilm; available at https address cdn.stemcell.com/media/files/manual/MADX1005-icell_glutaneurons_users_guide.pdf (accessed on e.g. 10 Nov. 2020). Compounds were added to the cells from pre-dilution plates (compound diluted in PBS) to reach the desired final concentration. The concentrations used were an 8-step half-log with the following concentrations (nM): 31.6; 10; 3.2; 1; 0.32; 0.1; 0.03; 0.01.

[0425] The cells were incubated with oligonucleotides for 4 days, followed by a three-times wash with PBS. The cell culture medium was changes twice weekly, where half the medium was replaced with fresh medium. At days 4, 7, 14, 21 and 28, the cells were lysed for qPCR analysis.

[0426] RNA purification and qPCR was performed as described in Example 2; however, using the qPCR assays described below for analysis.

Human ATXN3 pre-mRNA using the qPCR assay: custom design “(ATXN3_exon_8-9(1)”, PrimeTime® XL qPCR Assay (IDT).

Probe:
(SEQ ID NO: 1134)
5′-/56-FAM/CTCCGCAGG/ZEN/GCT ATTCAGCT AAGT /
31ABkFQ/-3′
Primer 1:
(SEQ ID NO: 1135)
5′-AGT AAGATTTGT ACCTGATGTCTGT-3′
Primer 2:
(SEQ ID NO: 1136)
5′-CATGGAAGATGAGGAAGCAGAT-3′

Human TBP pre-mRNA using the qPCR assay: “Hs.PT.58v. 39858774”, PrimeTime® XL qPCR Assay (IDT)

Probe:
(SEQ ID NO: 1131)
5′- /5HEX/TGA TCT TTG /ZEN/CAG TGA CCC AGC ATC A/
3IABkFQ/ -3′
Primer 1:
(SEQ ID NO: 1132)
5′- GCT GTT TAA CTT CGC TTC CG-3′
Primer 2:
(SEQ ID NO: 1133)
5′- CAG CAA CTT CCT CAA TTC CTT G-3′

### Results:

[0427] The calculated EC50 values for each compound are shown in Table 16. Compound ID Nos. 1122_67, 1813_15 and 1605_5 were generally the most potent compounds, maintaining low EC50 values over the 4-week duration of the experiment (Table 16).

[0428] The maximally obtained knockdown (% remaining ATXN3 transcript as compared to untreated cells) value, where a low value indicates an effective knockdown, for each compound is presented in Table 17. The compounds showing the highest maximal efficacy at all assessed time points were 1605_5, 1605_3, 1605_2 and 1605_4 (Table 17).

TABLE 16
EC50 in hiPSC-derived neurons

| | EC50 in hiPSC-derived neurons, nM | | | | |
|---|---|---|---|---|---|
| CMP ID | Day 4 | Day 7 | Day 14 | Day 21 | Day 28 |
| 1122_67 | 31.2 | 14.9 | 3.3 | 3.7 | 3.2 |
| 1813_15 | 29.8 | 22.0 | 6.8 | 11.5 | 10.1 |
| 1605_3 | 55.1 | 62.0 | 16.3 | 30.5 | 31.4 |
| 1605_2 | 41.9 | 55.0 | 20.2 | 38.3 | 34.6 |
| 1605_4 | 55.8 | 57.4 | 17.5 | 34.1 | 28.8 |
| 1605_5 | 44.3 | 43 | 13.2 | 9.6 | 6.9 |
| 1287095 | 147.1 | 58.7 | 15.0 | 14.5 | 18.5 |
| 1304862 | 2217 | 1383 | 222.5 | 294.7 | 250.9 |
| 1102579 | 294.5 | 287.7 | 37.4 | 54.7 | 32.0 |

TABLE 17
Maximal efficacy (% remaining mRNA) in hiPSC-derived neurons

| | Maximal efficacy (% remaining ATXN3 mRNA) in hiPSC- | | | | |
|---|---|---|---|---|---|
| | derived neurons | | | | |
| CMP ID | Day 4 | Day 7 | Day 14 | Day 21 | Day 28 |
| 1122_67 | 7.4 | 5.4 | 4.2 | 3.9 | 3.7 |
| 1813_15 | 7.1 | 5.2 | 4.7 | 4.4 | 3.6 |
| 1605_3 | 5.2 | 4.2 | 1.9 | 0.6 | 0.8 |
| 1605_2 | 5.7 | 3.9 | 1.9 | 1.1 | 1.2 |
| 1605_4 | 6.2 | 5.1 | 2.7 | 2.5 | 0.9 |
| 1605_5 | 6.9 | 4.9 | 3.1 | 2.7 | 2.3 |
| 1287095 | 10.6 | 9 | 7 | 5.3 | 6.5 |
| 1304862 | 12.3 | 7.8 | 4.5 | 3.8 | 2.8 |
| 1102579 | 8.8 | 8.3 | 6.1 | 3.5 | 4.4 |

TABLE 8B

| | Cortex | | Midbrain | | Cerebellum | | Hippocampus | | Pons/medulla | | Striatum | |
|---|---|---|---|---|---|---|---|---|---|---|---|---|
| | | Max | | Max | | Max | | Max | | Max | | Max |
| | EC50 | efficacy (% | EC50 | efficacy (% | EC50 | efficacy (% | EC50 | efficacy (% | EC50 | efficacy (% | EC50 | efficacy (% |
| Compounds | (nM) | remaining) | (nM) | remaining) | (nM) | remaining) | (nM) | remaining) | (nM) | remaining) | (nM) | remaining) |
| 1856_1 | 251 | 33 | 77 | 20 | 434 | 49 | 202 | 41 | — | 24 | 103 | 27 |
| 1813_1 | 260 | 22 | 93 | 20 | 347 | 47 | 279 | 30 | — | 22 | 89 | 18 |
| 1812_1 | 307 | 52 | 156 | 28 | 603 | 50 | 233 | 35 | — | 26 | 184 | 32 |
| 1809_2 | 134 | 57 | 153 | 34 | 511 | 50 | 111 | 46 | — | 21 | 93 | 29 |
| 1607_1 | 193 | 40 | 89 | 17 | 120 | 42 | 81 | 21 | — | 15 | 63 | 26 |
| 1122_62 | 125 | 56 | 74 | 26 | 226 | 16 | 86 | 46 | — | 19 | 54 | 36 |
| 1122_67 | 125 | 23 | 79 | 14 | 261 | 27 | 146 | 22 | — | 13 | 88 | 19 |
| 1122_33 | 102 | 47 | 38 | 16 | 166 | 35 | 79 | 24 | — | 17 | 63 | 29 |

TABLE 10

| | | Cortex (A1) | | Cerebellum | | Brainstem | | Midbrain | | Striatum | |
|---|---|---|---|---|---|---|---|---|---|---|---|
| | | EC50 | Max KD | EC50 | Max KD | EC50 | Max KD | EC50 | Max KD | EC50 | Max KD |
| Tissue | | (nM) | observed | (nM) | observed | (nM) | observed | (nM) | observed | (nM) | observed |
| 1 week of | 1122_67 | 242 | 88% | 833 | 74% | 196 | 87% | 165 | 89% | 148 | 77% |
| treatment | 1813_1 | 278 | 61% | 966 | 57% | 377 | 85% | 183 | 90% | 118 | 51% |
| | 1100673 | 391 | 67% | 2012 | 48% | 769 | 79% | 279 | 81% | 331 | 69% |
| 4 week of | 1122_67 | 100 | 92% | 365 | 81% | 81 | 93% | 94 | 95% | 46 | 89% |
| treatment | 1813_1 | ND | ND | ND | ND | ND | ND | ND | ND | ND | ND |
| | 1100673 | 199 | 49% | 1229 | 33% | 419 | 72% | 129 | 74% | 130 | 35% |

| | | | | Spinal cord, | | Spinal cord, | | Spinal cord, | |
|---|---|---|---|---|---|---|---|---|---|
| | | Hippocampus | | cervical | | thoracic | | lumbar | |
| | | EC50 | Max KD | EC50 | Max KD | EC50 | Max KD | EC50 | Max KD |
| Tissue | | (nM) | observed | (nM) | observed | (nM) | observed | (nM) | observed |
| 1 week of | 1122_67 | 243 | 75% | 41 | 89% | 39 | 90% | 54 | 89% |
| treatment | 1813_1 | 341 | 63% | 45 | 90% | 36 | 92% | 48 | 91% |
| | 1100673 | 516 | 66% | 83 | 83% | 51 | 83% | 68 | 82% |
| 4 week of | 1122_67 | 89 | 92% | 16 | 93% | Imprecise | 93% | 18 | 93% |
| treatment | 1813_1 | ND | ND | ND | ND | ND | ND | ND | ND |
| | 1100673 | 329 | 52% | 48 | 83% | Imprecise | 84% | 56 | 84% |

TABLE 11
Compound and data table (Example 13)
In the data column headings, “%” indicates “% ATXN3 mRNA remaining”

| | | | A431 | A431 | SK-N-AS |
|---|---|---|---|---|---|
| SEQ ID | CMP ID | | 0.5 μM | 1 μM | 1.5 μM |
| NO | NO | HELM | (%) | (%) | (%) |
| 1116 | 1116_3 | [LR](T)[sP].[LR]([5meC])[sP].[LR](T)[sP].[dR](T)[sP].[dR](C)[sP].[dR](A)[sP].[dR](T)[sP]. | | 72.2 | 66.9 |
| | | [dR](T)[sP].[dR](A)[sP].[LR](T)[sP].[dR](A)[sP].[dR](C)[sP].[dR](C)[sP].[LR](A)[sP]. | | | |
| | | [dR](T)[sP].[dR](C)[sP].[dR](A)[sP].[dR](A)[sP].[LR](A)[sP].[LR](T) | | | |
| 1117 | 1117_3 | [LR](G)[sP].[LR](T)[sP].[LR](T)[sP].[LR](T)[sP].[dR](C)[sP].[LR](A)[sP].[dR](T)[sP]. | | 47.7 | 55.1 |
| | | [dR](A)[sP].[dR](T)[sP].[dR](T)[sP].[dR](T)[sP].[dR](T)[sP].[dR](T)[sP].[dR](A)[sP]. | | | |
| | | [dR](A)[sP].[LR](T)[sP].[LR]([5meC])[sP].[LR]([5meC]) | | | |
| 1117 | 1117_4 | [LR](G)[sP].[LR](T)[sP].[LR](T)[sP].[LR](T)[sP].[dR](C)[sP].[dR](A)[sP].[dR](T)[sP]. | | 90.1 | 88.8 |
| | | [dR](A)[sP].[dR](T)[sP].[dR](T)[sP].[dR](T)[sP].[LR](T)[sP].[LR](T)[sP].[dR](A)[sP]. | | | |
| | | [LR](A)[sP].[dR](T)[sP].[LR]([5meC])[sP].[LR]([5meC]) | | | |
| 1117 | 1117_5 | [LR](G)[sP].[LR](T)[sP].[LR](T)[sP].[LR](T)[sP].[dR](C)[sP].[dR](A)[sP].[dR](T)[sP]. | | 34.3 | 41.3 |
| | | [dR](A)[sP].[LR](T)[sP].[dR](T)[sP].[dR](T)[sP].[dR](T)[sP].[dR](T)[sP].[dR](A)[sP]. | | | |
| | | [dR](A)[sP].[LR](T)[sP].[LR]([5meC])[sP].[LR]([5meC]) | | | |
| 1117 | 1117_6 | [LR](G)[sP].[LR](T)[sP].[LR](T)[sP].[dR](T)[sP].[dR](C)[sP].[dR](A)[sP].[dR](T)[sP]. | | 35.7 | 43.8 |
| | | [LR](A)[sP].[LR](T)[sP].[dR](T)[sP].[dR](T)[sP].[dR](T)[sP].[dR](T)[sP].[dR](A)[sP]. | | | |
| | | [dR](A)[sP].[LR](T)[sP].[LR]([5meC])[sP].[LR]([5meC]) | | | |
| 1117 | 1117_7 | [LR](G)[sP].[LR](T)[sP].[LR](T)[sP].[dR](T)[sP].[dR](C)[sP].[LR](A)[sP].[dR](T)[sP]. | | 85.2 | 78.3 |
| | | [dR](A)[sP].[dR](T)[sP].[dR](T)[sP].[dR](T)[sP].[dR](T)[sP].[dR](T)[sP].[LR](A)[sP]. | | | |
| | | [dR](A)[sP].[LR](T)[sP].[LR]([5meC])[sP].[LR]([5meC]) | | | |
| 1117 | 1117_8 | [LR](G)[sP].[LR](T)[sP].[dR](T)[sP].[LR](T)[sP].[LR]([5meC])[sP].[dR](A)[sP].[dR](T)[sP]. | | 74 | 68.3 |
| | | [dR](A)[sP].[dR](T)[sP].[dR](T)[sP].[dR](T)[sP].[dR](T)[sP].[dR](T)[sP].[dR](A)[sP]. | | | |
| | | [LR](A)[sP].[LR](T)[sP].[LR]([5meC])[sP].[LR]([5meC]) | | | |
| 1117 | 1117_9 | [LR](G)[sP].[LR](T)[sP].[LR](T)[sP].[LR](T)[sP].[dR](C)[sP].[LR](A)[sP].[dR](T)[sP]. | | 101 | 93.7 |
| | | [LR](A)[sP].[LR](T)[sP].[LR](T)[sP].[dR](T)[sP].[dR](T)[sP].[dR](T)[sP].[dR](A)[sP]. | | | |
| | | [dR](A)[sP].[dR](T)[sP].[LR]([5meC])[sP].[LR]([5meC]) | | | |
| 1117 | 1117_10 | [LR](G)[sP].[LR](T)[sP].[dR](T)[sP].[dR](T)[sP].[dR](C)[sP].[dR](A)[sP].[dR](T)[sP]. | | 51.6 | 55 |
| | | [dR](A)[sP].[LR](T)[sP].[dR](T)[sP].[LR](T)[sP].[LR](T)[sP].[dR](T)[sP].[dR](A)[sP]. | | | |
| | | [dR](A)[sP].[LR](T)[sP].[LR]([5meC])[sP].[LR]([5meC]) | | | |
| 1117 | 1117_11 | [LR](G)[sP].[LR](T)[sP].[dR](T)[sP].[dR](T)[sP].[dR](C)[sP].[dR](A)[sP].[dR](T)[sP]. | | 42.3 | 41.5 |
| | | [dR](A)[sP].[LR](T)[sP].[dR](T)[sP].[dR](T)[sP].[dR](T)[sP].[LR](T)[sP].[LR](A)[sP]. | | | |
| | | [dR](A)[sP].[dR](T)[sP].[LR]([5meC])[sP].[LR]([5meC]) | | | |
| 1117 | 1117_12 | [LR](G)[sP].[LR](T)[sP].[LR](T)[sP].[dR](T)[sP].[dR](C)[sP].[dR](A)[sP].[dR](T)[sP]. | | 46.5 | 55 |
| | | [dR](A)[sP].[dR](T)[sP].[LR](T)[sP].[LR](T)[sP].[dR](T)[sP].[dR](T)[sP].[dR](A)[sP]. | | | |
| | | [dR](A)[sP].[dR](T)[sP].[LR]([5meC])[sP].[LR]([5meC]) | | | |
| 1117 | 1117_13 | [LR](G)[sP].[LR](T)[sP].[LR](T)[sP].[LR](T)[sP].[dR](C)[sP].[dR](A)[sP].[dR](T)[sP]. | | 65.5 | 61.9 |
| | | [dR](A)[sP].[dR](T)[sP].[dR](T)[sP].[dR](T)[sP].[LR](T)[sP].[dR](T)[sP].[dR](A)[sP]. | | | |
| | | [dR](A)[sP].[dR](T)[sP].[LR]([5meC])[sP].[LR]([5meC]) | | | |
| 1117 | 1117_14 | [LR](G)[sP].[LR](T)[sP].[LR](T)[sP].[dR](T)[sP].[dR](C)[sP].[dR](A)[sP].[LR](T)[sP]. | | 29 | 45.9 |
| | | [LR](A)[sP].[LR](T)[sP].[dR](T)[sP].[dR](T)[sP].[dR](T)[sP].[dR](T)[sP].[dR](A)[sP]. | | | |
| | | [dR](A)[sP].[dR](T)[sP].[LR]([5meC])[sP].[LR]([5meC]) | | | |
| 1117 | 1117_15 | [LR](G)[sP].[LR](T)[sP].[dR](T)[sP].[dR](T)[sP].[dR](C)[sP].[dR](A)[sP].[dR](T)[sP]. | | 73.8 | 52.6 |
| | | [dR](A)[sP].[dR](T)[sP].[dR](T)[sP].[LR](T)[sP].[LR](T)[sP].[LR](T)[sP].[dR](A)[sP]. | | | |
| | | [LR](A)[sP].[dR](T)[sP].[LR]([5meC])[sP].[LR]([5meC]) | | | |
| 1117 | 1117_16 | [LR](G)[sP].[LR](T)[sP].[LR](T)[sP].[dR](T)[sP].[dR](C)[sP].[LR](A)[sP].[dR](T)[sP]. | | 40.7 | 45.3 |
| | | [dR](A)[sP].[dR](T)[sP].[dR](T)[sP].[dR](T)[sP].[dR](T)[sP].[dR](T)[sP].[dR](A)[sP]. | | | |
| | | [dR](A)[sP].[LR](T)[sP].[LR]([5meC])[sP].[LR]([5meC]) | | | |
| 1117 | 1117_17 | [LR](G)[sP].[LR](T)[sP].[LR](T)[sP].[LR](T)[sP].[dR](C)[sP].[dR](A)[sP].[LR](T)[sP]. | | 89.9 | 76.4 |
| | | [dR](A)[sP].[dR](T)[sP].[dR](T)[sP].[dR](T)[sP].[dR](T)[sP].[dR](T)[sP].[LR](A)[sP]. | | | |
| | | [LR](A)[sP].[dR](T)[sP].[LR]([5meC])[sP].[LR]([5meC]) | | | |
| 1117 | 1117_18 | [LR](G)[sP].[LR](T)[sP].[LR](T)[sP].[LR](T)[sP].[dR](C)[sP].[LR](A)[sP].[LR](T)[sP]. | | 80.7 | 84.5 |
| | | [dR](A)[sP].[dR](T)[sP].[dR](T)[sP].[dR](T)[sP].[dR](T)[sP].[dR](T)[sP].[LR](A)[sP]. | | | |
| | | [dR](A)[sP].[dR](T)[sP].[LR]([5meC])[sP].[LR]([5meC]) | | | |
| 1117 | 1117_19 | [LR](G)[sP].[LR](T)[sP].[dR](T)[sP].[dR](T)[sP].[dR](C)[sP].[dR](A)[sP].[dR](T)[sP]. | | 37.9 | 38.9 |
| | | [dR](A)[sP].[LR](T)[sP].[dR](T)[sP].[dR](T)[sP].[dR](T)[sP].[LR](T)[sP].[dR](A)[sP]. | | | |
| | | [dR](A)[sP].[LR](T)[sP].[LR]([5meC])[sP].[LR]([5meC]) | | | |
| 1117 | 1117_20 | [LR](G)[sP].[LR](T)[sP].[LR](T)[sP].[dR](T)[sP].[dR](C)[sP].[LR](A)[sP].[LR](T)[sP]. | | 65.3 | 61.4 |
| | | [LR](A)[sP].[dR](T)[sP].[LR](T)[sP].[dR](T)[sP].[dR](T)[sP].[dR](T)[sP].[dR](A)[sP]. | | | |
| | | [dR](A)[sP].[dR](T)[sP].[LR]([5meC])[sP].[LR]([5meC]) | | | |
| 1117 | 1117_21 | [LR](G)[sP].[LR](T)[sP].[LR](T)[sP].[dR](T)[sP].[dR](C)[sP].[dR](A)[sP].[LR](T)[sP]. | | 29.4 | 42.8 |
| | | [dR](A)[sP].[LR](T)[sP].[dR](T)[sP].[dR](T)[sP].[dR](T)[sP].[dR](T)[sP].[dR](A)[sP]. | | | |
| | | [dR](A)[sP].[dR](T)[sP].[LR]([5meC])[sP].[LR]([5meC]) | | | |
| 1117 | 1117_22 | [LR](G)[sP].[LR](T)[sP].[dR](T)[sP].[LR](T)[sP].[dR](C)[sP].[dR](A)[sP].[dR](T)[sP]. | | 96.1 | 86.5 |
| | | [dR](A)[sP].[dR](T)[sP].[dR](T)[sP].[LR](T)[sP].[dR](T)[sP].[LR](T)[sP].[LR](A)[sP]. | | | |
| | | [dR](A)[sP].[dR](T)[sP].[LR]([5meC])[sP].[LR]([5meC]) | | | |
| 1117 | 1117_23 | [LR](G)[sP].[LR](T)[sP].[dR](T)[sP].[dR](T)[sP].[dR](C)[sP].[dR](A)[sP].[dR](T)[sP]. | | 44 | 49.1 |
| | | [dR](A)[sP].[LR](T)[sP].[LR](T)[sP].[LR](T)[sP].[dR](T)[sP].[dR](T)[sP].[dR](A)[sP]. | | | |
| | | [dR](A)[sP].[LR](T)[sP].[LR]([5meC])[sP].[LR]([5meC]) | | | |
| 1117 | 1117_24 | [LR](G)[sP].[LR](T)[sP].[LR](T)[sP].[dR](T)[sP].[dR](C)[sP].[dR](A)[sP].[dR](T)[sP]. | | 79.2 | 72.4 |
| | | [dR](A)[sP].[dR](T)[sP].[LR](T)[sP].[LR](T)[sP].[dR](T)[sP].[LR](T)[sP].[dR](A)[sP]. | | | |
| | | [LR](A)[sP].[dR](T)[sP].[LR]([5meC])[sP].[LR]([5meC]) | | | |
| 1117 | 1117_25 | [LR](G)[sP].[LR](T)[sP].[dR](T)[sP].[dR](T)[sP].[LR]([5meC])[sP].[dR](A)[sP].[dR](T)[sP]. | | 69.4 | 67.6 |
| | | [dR](A)[sP].[dR](T)[sP].[dR](T)[sP].[dR](T)[sP].[LR](T)[sP].[dR](T)[sP].[dR](A)[sP]. | | | |
| | | [dR](A)[sP].[LR](T)[sP].[LR]([5meC])[sP].[LR]([5meC]) | | | |
| 1117 | 1117_26 | [LR](G)[sP].[LR](T)[sP].[LR](T)[sP].[dR](T)[sP].[dR](C)[sP].[LR](A)[sP].[dR](T)[sP]. | | 90.9 | 83.5 |
| | | [dR](A)[sP].[dR](T)[sP].[dR](T)[sP].[dR](T)[sP].[dR](T)[sP].[LR](T)[sP].[dR](A)[sP]. | | | |
| | | [LR](A)[sP].[LR](T)[sP].[LR]([5meC])[sP].[LR]([5meC]) | | | |
| 1117 | 1117_27 | [LR](G)[sP].[LR](T)[sP].[LR](T)[sP].[LR](T)[sP].[dR](C)[sP].[LR](A)[sP].[LR](T)[sP]. | | 66.8 | 67.6 |
| | | [LR](A)[sP].[dR](T)[sP].[dR](T)[sP].[dR](T)[sP].[dR](T)[sP].[dR](T)[sP].[dR](A)[sP]. | | | |
| | | [dR](A)[sP].[dR](T)[sP].[LR]([5meC])[sP].[LR]([5meC]) | | | |
| 1117 | 1117_28 | [LR](G)[sP].[LR](T)[sP].[dR](T)[sP].[dR](T)[sP].[dR](C)[sP].[dR](A)[sP].[dR](T)[sP]. | | 50.8 | 42.5 |
| | | [dR](A)[sP].[LR](T)[sP].[LR](T)[sP].[dR](T)[sP].[dR](T)[sP].[LR](T)[sP].[LR](A)[sP]. | | | |
| | | [dR](A)[sP].[dR](T)[sP].[LR]([5meC])[sP].[LR]([5meC]) | | | |
| 1117 | 1117_29 | [LR](G)[sP].[LR](T)[sP].[dR](T)[sP].[dR](T)[sP].[dR](C)[sP].[dR](A)[sP].[dR](T)[sP]. | | 83.9 | 67.2 |
| | | [dR](A)[sP].[LR](T)[sP].[LR](T)[sP].[LR](T)[sP].[LR](T)[sP].[dR](T)[sP].[dR](A)[sP]. | | | |
| | | [LR](A)[sP].[dR](T)[sP].[LR]([5meC])[sP].[LR]([5meC]) | | | |
| 1117 | 1117_30 | [LR](G)[sP].[LR](T)[sP].[LR](T)[sP].[dR](T)[sP].[dR](C)[sP].[LR](A)[sP].[LR](T)[sP]. | | 61.2 | 61.3 |
| | | [dR](A)[sP].[dR](T)[sP].[LR](T)[sP].[dR](T)[sP].[dR](T)[sP].[dR](T)[sP].[dR](A)[sP]. | | | |
| | | [dR](A)[sP].[dR](T)[sP].[LR]([5meC])[sP].[LR]([5meC]) | | | |
| 1121 | 1121_3 | [LR]([5meC])[sP].[LR](T)[sP].[LR]([5meC])[sP].[dR](T)[sP].[dR](C)[sP].[dR](A)[sP]. | | 70.8 | 64.5 |
| | | [dR](A)[sP].[dR](C)[sP].[dR](T)[sP].[dR](T)[sP].[dR](C)[sP].[dR](T)[sP].[dR](A)[sP]. | | | |
| | | [dR](C)[sP].[LR](T)[sP].[dR](A)[sP].[dR](C)[sP].[dR](T)[sP].[LR](A)[sP].[LR](A) | | | |
| 1121 | 1121_4 | [LR]([5meC])[sP].[LR](T)[sP].[LR]([5meC])[sP].[dR](T)[sP].[dR](C)[sP].[dR](A)[sP]. | | 66.7 | 70.8 |
| | | [dR](A)[sP].[dR](C)[sP].[dR](T)[sP].[LR](T)[sP].[dR](C)[sP].[dR](T)[sP].[dR](A)[sP]. | | | |
| | | [dR](C)[sP].[dR](T)[sP].[dR](A)[sP].[LR]([5meC])[sP].[dR](T)[sP].[LR](A)[sP].[LR](A) | | | |
| 1122 | 1122_407 | [LR](A)[sP].[LR](A)[sP].[dR](T)[sP].[LR]([5meC])[sP].[LR](T)[sP].[dR](T)[sP].[dR](A)[sP]. | | 52.7 | 46.1 |
| | | [dR](T)[sP].[LR](T)[sP].[LR](T)[sP].[dR](A)[sP].[dR](C)[sP].[dR](A)[sP].[dR](T)[sP]. | | | |
| | | [dR](C)[sP].[dR](T)[sP].[dR](T)[sP].[LR]([5meC])[sP].[LR]([5meC]) | | | |
| 1122 | 1122_408 | [LR](A)[sP].[LR](A)[sP].[dR](T)[sP].[dR](C)[sP].[dR](T)[sP].[dR](T)[sP].[dR](A)[sP]. | | 81.4 | 75.6 |
| | | [dR](T)[sP].[dR](T)[sP].[dR](T)[sP].[LR](A)[sP].[LR]([5meC])[sP].[dR](A)[sP]. | | | |
| | | [dR](T)[sP].[LR]([5meC])[sP].[dR](T)[sP].[LR](T)[sP].[LR]([5meC])[sP].[LR]([5meC]) | | | |
| 1122 | 1122_409 | [LR](A)[sP].[LR](A)[sP].[dR](T)[sP].[dR](C)[sP].[LR](T)[sP].[LR](T)[sP].[dR](A)[sP]. | | 95.5 | 87.9 |
| | | [LR](T)[sP].[LR](T)[sP].[dR](T)[sP].[LR](A)[sP].[dR](C)[sP].[dR](A)[sP].[dR](T)[sP]. | | | |
| | | [dR](C)[sP].[dR](T)[sP].[dR](T)[sP].[LR]([5meC])[sP].[LR]([5meC]) | | | |
| 1122 | 1122_410 | [LR](A)[sP].[LR](A)[sP].[dR](T)[sP].[dR](C)[sP].[dR](T)[sP].[dR](T)[sP].[dR](A)[sP]. | | 73.1 | 69.4 |
| | | [LR](T)[sP].[LR](T)[sP].[dR](T)[sP].[LR](A)[sP].[dR](C)[sP].[dR](A)[sP].[dR](T)[sP]. | | | |
| | | [dR](C)[sP].[dR](T)[sP].[dR](T)[sP].[LR]([5meC])[sP].[LR]([5meC]) | | | |
| 1122 | 1122_411 | [LR](A)[sP].[LR](A)[sP].[dR](T)[sP].[dR](C)[sP].[LR](T)[sP].[dR](T)[sP].[dR](A)[sP]. | | 36.5 | 42.6 |
| | | [LR](T)[sP].[LR](T)[sP].[dR](T)[sP].[dR](A)[sP].[dR](C)[sP].[dR](A)[sP].[dR](T)[sP]. | | | |
| | | [dR](C)[sP].[dR](T)[sP].[LR](T)[sP].[LR]([5meC])[sP].[LR]([5meC]) | | | |
| 1122 | 1122_412 | [LR](A)[sP].[LR](A)[sP].[LR](T)[sP].[dR](C)[sP].[dR](T)[sP].[dR](T)[sP].[dR](A)[sP]. | | 62.7 | 62.2 |
| | | [LR](T)[sP].[LR](T)[sP].[dR](T)[sP].[LR](A)[sP].[dR](C)[sP].[dR](A)[sP].[dR](T)[sP]. | | | |
| | | [dR](C)[sP].[dR](T)[sP].[dR](T)[sP].[LR]([5meC])[sP].[LR]([5meC]) | | | |
| 1122 | 1122_413 | [LR](A)[sP].[LR](A)[sP].[LR](T)[sP].[dR](C)[sP].[dR](T)[sP].[dR](T)[sP].[dR](A)[sP]. | | 29.2 | 34.7 |
| | | [dR](T)[sP].[dR](T)[sP].[dR](T)[sP].[LR](A)[sP].[LR]([5meC])[sP].[dR](A)[sP]. | | | |
| | | [LR](T)[sP].[dR](C)[sP].[dR](T)[sP].[dR](T)[sP].[LR]([5meC])[sP].[LR]([5meC]) | | | |
| 1122 | 1122_414 | [LR](A)[sP].[LR](A)[sP].[LR](T)[sP].[LR]([5meC])[sP].[dR](T)[sP].[dR](T)[sP].[dR](A)[sP]. | | 78.2 | 70.8 |
| | | [dR](T)[sP].[dR](T)[sP].[dR](T)[sP].[LR](A)[sP].[dR](C)[sP].[LR](A)[sP].[dR](T)[sP]. | | | |
| | | [dR](C)[sP].[LR](T)[sP].[dR](T)[sP].[LR]([5meC])[sP].[LR]([5meC]) | | | |
| 1122 | 1122_415 | [LR](A)[sP].[LR](A)[sP].[dR](T)[sP].[LR]([5meC])[sP].[dR](T)[sP].[dR](T)[sP].[dR](A)[sP]. | | 60.4 | 55.3 |
| | | [LR](T)[sP].[LR](T)[sP].[LR](T)[sP].[dR](A)[sP].[dR](C)[sP].[dR](A)[sP].[dR](T)[sP]. | | | |
| | | [dR](C)[sP].[dR](T)[sP].[dR](T)[sP].[LR]([5meC])[sP].[LR]([5meC]) | | | |
| 1122 | 1122_416 | [LR](A)[sP].[LR](A)[sP].[dR](T)[sP].[dR](C)[sP].[dR](T)[sP].[dR](T)[sP].[dR](A)[sP]. | | 80.5 | 69.7 |
| | | [dR](T)[sP].[LR](T)[sP].[LR](T)[sP].[dR](A)[sP].[dR](C)[sP].[dR](A)[sP].[LR](T)[sP]. | | | |
| | | [dR](C)[sP].[LR](T)[sP].[dR](T)[sP].[LR]([5meC])[sP].[LR]([5meC]) | | | |
| 1122 | 1122_417 | [LR](A)[sP].[LR](A)[sP].[dR](T)[sP].[dR](C)[sP].[dR](T)[sP].[dR](T)[sP].[LR](A)[sP]. | 74.9 | | 66.2 |
| | | [dR](T)[sP].[dR](T)[sP].[dR](T)[sP].[dR](A)[sP].[dR](C)[sP].[dR](A)[sP].[dR](T)[sP]. | | | |
| | | [dR](C)[sP].[dR](T)[sP].[dR](T)[sP].[LR]([5meC])[sP].[LR]([5meC]) | | | |
| 1122 | 1122_418 | [LR](A)[sP].[LR](A)[sP].[dR](T)[sP].[dR](C)[sP].[LR](T)[sP].[dR](T)[sP].[dR](A)[sP]. | 73.2 | | 61.8 |
| | | [dR](T)[sP].[dR](T)[sP].[dR](T)[sP].[dR](A)[sP].[dR](C)[sP].[dR](A)[sP].[dR](T)[sP]. | | | |
| | | [dR](C)[sP].[dR](T)[sP].[dR](T)[sP].[LR]([5meC])[sP].[LR]([5meC]) | | | |
| 1122 | 1122_419 | [LR](A)[sP].[LR](A)[sP].[dR](T)[sP].[dR](C)[sP].[dR](T)[sP].[dR](T)[sP].[dR](A)[sP]. | 63.1 | | 55.4 |
| | | [dR](T)[sP].[dR](T)[sP].[dR](T)[sP].[dR](A)[sP].[dR](C)[sP].[dR](A)[sP].[dR](T)[sP]. | | | |
| | | [dR](C)[sP].[LR](T)[sP].[dR](T)[sP].[LR]([5meC])[sP].[LR]([5meC]) | | | |
| 1122 | 1122_420 | [LR](A)[sP].[LR](A)[sP].[dR](T)[sP].[dR](C)[sP].[LR](T)[sP].[dR](T)[sP].[LR](A)[sP]. | 57.4 | | 50.2 |
| | | [dR](T)[sP].[dR](T)[sP].[dR](T)[sP].[dR](A)[sP].[dR](C)[sP].[dR](A)[sP].[dR](T)[sP]. | | | |
| | | [dR](C)[sP].[dR](T)[sP].[dR](T)[sP].[LR]([5meC])[sP].[LR]([5meC]) | | | |
| 1122 | 1122_421 | [LR](A)[sP].[LR](A)[sP].[dR](T)[sP].[dR](C)[sP].[LR](T)[sP].[dR](T)[sP].[dR](A)[sP]. | 55.5 | | 54 |
| | | [dR](T)[sP].[dR](T)[sP].[dR](T)[sP].[dR](A)[sP].[dR](C)[sP].[LR](A)[sP].[dR](T)[sP]. | | | |
| | | [dR](C)[sP].[dR](T)[sP].[dR](T)[sP].[LR]([5meC])[sP].[LR]([5meC]) | | | |
| 1122 | 1122_422 | [LR](A)[sP].[LR](A)[sP].[dR](T)[sP].[dR](C)[sP].[dR](T)[sP].[LR](T)[sP].[dR](A)[sP]. | 66.8 | | 58.4 |
| | | [dR](T)[sP].[dR](T)[sP].[dR](T)[sP].[dR](A)[sP].[dR](C)[sP].[dR](A)[sP].[dR](T)[sP]. | | | |
| | | [dR](C)[sP].[dR](T)[sP].[dR](T)[sP].[LR]([5meC])[sP].[LR]([5meC]) | | | |
| 1122 | 1122_423 | [LR](A)[sP].[LR](A)[sP].[dR](T)[sP].[dR](C)[sP].[LR](T)[sP].[dR](T)[sP].[dR](A)[sP]. | 69.1 | | 62.5 |
| | | [dR](T)[sP].[dR](T)[sP].[dR](T)[sP].[LR](A)[sP].[dR](C)[sP].[dR](A)[sP].[dR](T)[sP]. | | | |
| | | [dR](C)[sP].[dR](T)[sP].[dR](T)[sP].[LR]([5meC])[sP].[LR]([5meC]) | | | |
| 1122 | 1122_424 | [LR](A)[sP].[LR](A)[sP].[dR](T)[sP].[dR](C)[sP].[LR](T)[sP].[dR](T)[sP].[dR](A)[sP]. | 60.3 | | 50.7 |
| | | [dR](T)[sP].[LR](T)[sP].[dR](T)[sP].[dR](A)[sP].[dR](C)[sP].[dR](A)[sP].[dR](T)[sP]. | | | |
| | | [dR](C)[sP].[dR](T)[sP].[dR](T)[sP].[LR]([5meC])[sP].[LR]([5meC]) | | | |
| 1122 | 1122_425 | [LR](A)[sP].[LR](A)[sP].[dR](T)[sP].[dR](C)[sP].[LR](T)[sP].[dR](T)[sP].[LR](A)[sP]. | 82.2 | | 71.4 |
| | | [dR](T)[sP].[dR](T)[sP].[dR](T)[sP].[LR](A)[sP].[dR](C)[sP].[dR](A)[sP].[dR](T)[sP]. | | | |
| | | [dR](C)[sP].[dR](T)[sP].[dR](T)[sP].[LR]([5meC])[sP].[LR]([5meC]) | | | |
| 1122 | 1122_426 | [LR](A)[sP].[LR](A)[sP].[dR](T)[sP].[dR](C)[sP].[LR](T)[sP].[dR](T)[sP].[LR](A)[sP]. | 55.3 | | 44.8 |
| | | [dR](T)[sP].[LR](T)[sP].[dR](T)[sP].[dR](A)[sP].[dR](C)[sP].[dR](A)[sP].[dR](T)[sP]. | | | |
| | | [dR](C)[sP].[dR](T)[sP].[dR](T)[sP].[LR]([5meC])[sP].[LR]([5meC]) | | | |
| 1122 | 1122_427 | [LR](A)[sP].[LR](A)[sP].[dR](T)[sP].[dR](C)[sP].[LR](T)[sP].[dR](T)[sP].[dR](A)[sP]. | 54.7 | | 50.3 |
| | | [LR](T)[sP].[dR](T)[sP].[dR](T)[sP].[dR](A)[sP].[dR](C)[sP].[dR](A)[sP].[dR](T)[sP]. | | | |
| | | [dR](C)[sP].[dR](T)[sP].[dR](T)[sP].[LR]([5meC])[sP].[LR]([5meC]) | | | |
| 1122 | 1122_428 | [LR](A)[sP].[LR](A)[sP].[dR](T)[sP].[dR](C)[sP].[LR](T)[sP].[dR](T)[sP].[dR](A)[sP]. | 38.6 | | 38.7 |
| | | [dR](T)[sP].[dR](T)[sP].[dR](T)[sP].[dR](A)[sP].[dR](C)[sP].[dR](A)[sP].[LR](T)[sP]. | | | |
| | | [dR](C)[sP].[dR](T)[sP].[dR](T)[sP].[LR]([5meC])[sP].[LR]([5meC]) | | | |
| 1122 | 1122_429 | [LR](A)[sP].[LR](A)[sP].[dR](T)[sP].[dR](C)[sP].[dR](T)[sP].[dR](T)[sP].[dR](A)[sP]. | 47.9 | | 44.5 |
| | | [dR](T)[sP].[dR](T)[sP].[dR](T)[sP].[dR](A)[sP].[dR](C)[sP].[LR](A)[sP].[dR](T)[sP]. | | | |
| | | [dR](C)[sP].[dR](T)[sP].[LR](T)[sP].[LR]([5meC])[sP].[LR]([5meC]) | | | |
| 1122 | 1122_430 | [LR](A)[sP].[LR](A)[sP].[dR](T)[sP].[LR]([5meC])[sP].[dR](T)[sP].[dR](T)[sP].[LR](A)[sP]. | 30.3 | | 25.8 |
| | | [dR](T)[sP].[dR](T)[sP].[dR](T)[sP].[dR](A)[sP].[dR](C)[sP].[dR](A)[sP].[dR](T)[sP]. | | | |
| | | [dR](C)[sP].[dR](T)[sP].[dR](T)[sP].[LR]([5meC])[sP].[LR]([5meC]) | | | |
| 1122 | 1122_431 | [LR](A)[sP].[LR](A)[sP].[dR](T)[sP].[dR](C)[sP].[LR](T)[sP].[dR](T)[sP].[LR](A)[sP]. | 29.7 | | 25.4 |
| | | [dR](T)[sP].[dR](T)[sP].[dR](T)[sP].[dR](A)[sP].[dR](C)[sP].[dR](A)[sP].[LR](T)[sP]. | | | |
| | | [dR](C)[sP].[dR](T)[sP].[dR](T)[sP].[LR]([5meC])[sP].[LR]([5meC]) | | | |
| 1122 | 1122_432 | [LR](A)[sP].[LR](A)[sP].[dR](T)[sP].[dR](C)[sP].[LR](T)[sP].[dR](T)[sP].[LR](A)[sP]. | 22.2 | | 21.2 |
| | | [dR](T)[sP].[dR](T)[sP].[dR](T)[sP].[dR](A)[sP].[dR](C)[sP].[dR](A)[sP].[dR](T)[sP]. | | | |
| | | [dR](C)[sP].[LR](T)[sP].[dR](T)[sP].[LR]([5meC])[sP].[LR]([5meC]) | | | |
| 1122 | 1122_433 | [LR](A)[sP].[LR](A)[sP].[dR](T)[sP].[dR](C)[sP].[LR](T)[sP].[dR](T)[sP].[dR](A)[sP]. | 46 | | 42.1 |
| | | [dR](T)[sP].[dR](T)[sP].[dR](T)[sP].[dR](A)[sP].[dR](C)[sP].[LR](A)[sP].[dR](T)[sP]. | | | |
| | | [dR](C)[sP].[LR](T)[sP].[dR](T)[sP].[LR]([5meC])[sP].[LR]([5meC]) | | | |
| 1122 | 1122_434 | [LR](A)[sP].[LR](A)[sP].[dR](T)[sP].[dR](C)[sP].[dR](T)[sP].[dR](T)[sP].[LR](A)[sP]. | 43.2 | | 34 |
| | | [dR](T)[sP].[dR](T)[sP].[dR](T)[sP].[dR](A)[sP].[dR](C)[sP].[dR](A)[sP].[dR](T)[sP]. | | | |
| | | [dR](C)[sP].[dR](T)[sP].[LR](T)[sP].[LR]([5meC])[sP].[LR]([5meC]) | | | |
| 1122 | 1122_435 | [LR](A)[sP].[LR](A)[sP].[dR](T)[sP].[dR](C)[sP].[dR](T)[sP].[LR](T)[sP].[dR](A)[sP]. | 60.8 | | 38.3 |
| | | [LR](T)[sP].[dR](T)[sP].[dR](T)[sP].[dR](A)[sP].[dR](C)[sP].[dR](A)[sP].[dR](T)[sP]. | | | |
| | | [dR](C)[sP].[dR](T)[sP].[dR](T)[sP].[LR]([5meC])[sP].[LR]([5meC]) | | | |
| 1122 | 1122_436 | [LR](A)[sP].[LR](A)[sP].[dR](T)[sP].[dR](C)[sP].[LR](T)[sP].[dR](T)[sP].[dR](A)[sP]. | 70 | | 55.5 |
| | | [dR](T)[sP].[dR](T)[sP].[LR](T)[sP].[dR](A)[sP].[dR](C)[sP].[dR](A)[sP].[dR](T)[sP]. | | | |
| | | [dR](C)[sP].[dR](T)[sP].[dR](T)[sP].[LR]([5meC])[sP].[LR]([5meC]) | | | |
| 1122 | 1122_437 | [LR](A)[sP].[LR](A)[sP].[dR](T)[sP].[LR]([5meC])[sP].[dR](T)[sP].[dR](T)[sP].[dR](A)[sP]. | 43.9 | | 38.8 |
| | | [dR](T)[sP].[dR](T)[sP].[dR](T)[sP].[LR](A)[sP].[dR](C)[sP].[dR](A)[sP].[dR](T)[sP]. | | | |
| | | [dR](C)[sP].[dR](T)[sP].[dR](T)[sP].[LR]([5meC])[sP].[LR]([5meC]) | | | |
| 1122 | 1122_438 | [LR](A)[sP].[LR](A)[sP].[dR](T)[sP].[dR](C)[sP].[LR](T)[sP].[dR](T)[sP].[dR](A)[sP]. | 64.3 | | 60.6 |
| | | [dR](T)[sP].[dR](T)[sP].[dR](T)[sP].[dR](A)[sP].[LR]([5meC])[sP].[dR](A)[sP].[dR](T)[sP]. | | | |
| | | [dR](C)[sP].[dR](T)[sP].[dR](T)[sP].[LR]([5meC])[sP].[LR]([5meC]) | | | |
| 1122 | 1122_439 | [LR](A)[sP].[LR](A)[sP].[dR](T)[sP].[dR](C)[sP].[dR](T)[sP].[dR](T)[sP].[dR](A)[sP]. | 64.5 | | 59.2 |
| | | [dR](T)[sP].[dR](T)[sP].[dR](T)[sP].[LR](A)[sP].[dR](C)[sP].[dR](A)[sP].[dR](T)[sP]. | | | |
| | | [dR](C)[sP].[dR](T)[sP].[LR](T)[sP].[LR]([5meC])[sP].[LR]([5meC]) | | | |
| 1122 | 1122_440 | [LR](A)[sP].[LR](A)[sP].[dR](T)[sP].[LR]([5meC])[sP].[dR](T)[sP].[dR](T)[sP].[dR](A)[sP]. | 35 | | 37.3 |
| | | [dR](T)[sP].[LR](T)[sP].[dR](T)[sP].[dR](A)[sP].[dR](C)[sP].[dR](A)[sP].[dR](T)[sP]. | | | |
| | | [dR](C)[sP].[dR](T)[sP].[dR](T)[sP].[LR]([5meC])[sP].[LR]([5meC]) | | | |
| 1122 | 1122_441 | [LR](A)[sP].[LR](A)[sP].[dR](T)[sP].[dR](C)[sP].[LR](T)[sP].[dR](T)[sP].[LR](A)[sP]. | 67 | | 44.9 |
| | | [dR](T)[sP].[dR](T)[sP].[LR](T)[sP].[dR](A)[sP].[dR](C)[sP].[dR](A)[sP].[dR](T)[sP]. | | | |
| | | [dR](C)[sP].[dR](T)[sP].[dR](T)[sP].[LR]([5meC])[sP].[LR]([5meC]) | | | |
| 1122 | 1122_442 | [LR](A)[sP].[LR](A)[sP].[dR](T)[sP].[LR]([5meC])[sP].[dR](T)[sP].[dR](T)[sP].[LR](A)[sP]. | 61.3 | | 50.3 |
| | | [dR](T)[sP].[dR](T)[sP].[dR](T)[sP].[LR](A)[sP].[dR](C)[sP].[dR](A)[sP].[dR](T)[sP]. | | | |
| | | [dR](C)[sP].[dR](T)[sP].[dR](T)[sP].[LR]([5meC])[sP].[LR]([5meC]) | | | |
| 1122 | 1122_443 | [LR](A)[sP].[LR](A)[sP].[dR](T)[sP].[dR](C)[sP].[LR](T)[sP].[dR](T)[sP].[dR](A)[sP]. | 49.7 | | 39.8 |
| | | [dR](T)[sP].[LR](T)[sP].[dR](T)[sP].[dR](A)[sP].[dR](C)[sP].[dR](A)[sP].[dR](T)[sP]. | | | |
| | | [dR](C)[sP].[LR](T)[sP].[dR](T)[sP].[LR]([5meC])[sP].[LR]([5meC]) | | | |
| 1122 | 1122_444 | [LR](A)[sP].[LR](A)[sP].[dR](T)[sP].[dR](C)[sP].[dR](T)[sP].[LR](T)[sP].[dR](A)[sP]. | 48.2 | | 44.5 |
| | | [dR](T)[sP].[dR](T)[sP].[dR](T)[sP].[dR](A)[sP].[dR](C)[sP].[LR](A)[sP].[dR](T)[sP]. | | | |
| | | [dR](C)[sP].[LR](T)[sP].[dR](T)[sP].[LR]([5meC])[sP].[LR]([5meC]) | | | |
| 1122 | 1122_445 | [LR](A)[sP].[LR](A)[sP].[dR](T)[sP].[dR](C)[sP].[dR](T)[sP].[dR](T)[sP].[dR](A)[sP]. | 54.2 | | 41.7 |
| | | [dR](T)[sP].[LR](T)[sP].[dR](T)[sP].[dR](A)[sP].[dR](C)[sP].[dR](A)[sP].[dR](T)[sP]. | | | |
| | | [dR](C)[sP].[dR](T)[sP].[LR](T)[sP].[LR]([5meC])[sP].[LR]([5meC]) | | | |
| 1122 | 1122_446 | [LR](A)[sP].[LR](A)[sP].[dR](T)[sP].[LR]([5meC])[sP].[dR](T)[sP].[dR](T)[sP].[dR](A)[sP]. | 33.1 | | 32.9 |
| | | [LR](T)[sP].[dR](T)[sP].[dR](T)[sP].[dR](A)[sP].[dR](C)[sP].[dR](A)[sP].[dR](T)[sP]. | | | |
| | | [dR](C)[sP].[dR](T)[sP].[dR](T)[sP].[LR]([5meC])[sP].[LR]([5meC]) | | | |
| 1122 | 1122_447 | [LR](A)[sP].[LR](A)[sP].[dR](T)[sP].[LR]([5meC])[sP].[dR](T)[sP].[dR](T)[sP].[LR](A)[sP]. | 27.5 | | 28.7 |
| | | [dR](T)[sP].[LR](T)[sP].[dR](T)[sP].[dR](A)[sP].[dR](C)[sP].[dR](A)[sP].[dR](T)[sP]. | | | |
| | | [dR](C)[sP].[dR](T)[sP].[dR](T)[sP].[LR]([5meC])[sP].[LR]([5meC]) | | | |
| 1122 | 1122_448 | [LR](A)[sP].[LR](A)[sP].[dR](T)[sP].[dR](C)[sP].[dR](T)[sP].[dR](T)[sP].[dR](A)[sP]. | 43.6 | | 38.4 |
| | | [LR](T)[sP].[dR](T)[sP].[dR](T)[sP].[dR](A)[sP].[dR](C)[sP].[dR](A)[sP].[dR](T)[sP]. | | | |
| | | [dR](C)[sP].[dR](T)[sP].[LR](T)[sP].[LR]([5meC])[sP].[LR]([5meC]) | | | |
| 1122 | 1122_449 | [LR](A)[sP].[LR](A)[sP].[dR](T)[sP].[dR](C)[sP].[dR](T)[sP].[dR](T)[sP].[LR](A)[sP]. | 36.9 | | 29.1 |
| | | [dR](T)[sP].[LR](T)[sP].[dR](T)[sP].[dR](A)[sP].[dR](C)[sP].[dR](A)[sP].[dR](T)[sP]. | | | |
| | | [dR](C)[sP].[dR](T)[sP].[LR](T)[sP].[LR]([5meC])[sP].[LR]([5meC]) | | | |
| 1122 | 1122_450 | [LR](A)[sP].[LR](A)[sP].[dR](T)[sP].[LR]([5meC])[sP].[dR](T)[sP].[dR](T)[sP].[dR](A)[sP]. | 14.2 | | 24.1 |
| | | [dR](T)[sP].[dR](T)[sP].[dR](T)[sP].[dR](A)[sP].[dR](C)[sP].[dR](A)[sP].[LR](T)[sP]. | | | |
| | | [dR](C)[sP].[dR](T)[sP].[dR](T)[sP].[LR]([5meC])[sP].[LR]([5meC]) | | | |
| 1122 | 1122_451 | [LR](A)[sP].[LR](A)[sP].[dR](T)[sP].[dR](C)[sP].[LR](T)[sP].[dR](T)[sP].[dR](A)[sP]. | 34.4 | | 30.1 |
| | | [LR](T)[sP].[dR](T)[sP].[dR](T)[sP].[dR](A)[sP].[dR](C)[sP].[dR](A)[sP].[dR](T)[sP]. | | | |
| | | [dR](C)[sP].[LR](T)[sP].[dR](T)[sP].[LR]([5meC])[sP].[LR]([5meC]) | | | |
| 1122 | 1122_452 | [LR](A)[sP].[LR](A)[sP].[dR](T)[sP].[dR](C)[sP].[dR](T)[sP].[LR](T)[sP].[dR](A)[sP]. | 40.7 | | 33.1 |
| | | [dR](T)[sP].[LR](T)[sP].[dR](T)[sP].[dR](A)[sP].[dR](C)[sP].[dR](A)[sP].[dR](T)[sP]. | | | |
| | | [dR](C)[sP].[LR](T)[sP].[dR](T)[sP].[LR]([5meC])[sP].[LR]([5meC]) | | | |
| 1122 | 1122_453 | [LR](A)[sP].[LR](A)[sP].[dR](T)[sP].[dR](C)[sP].[LR](T)[sP].[dR](T)[sP].[dR](A)[sP]. | 44.3 | | 44 |
| | | [dR](T)[sP].[dR](T)[sP].[dR](T)[sP].[dR](A)[sP].[dR](C)[sP].[dR](A)[sP].[LR](T)[sP]. | | | |
| | | [dR](C)[sP].[LR](T)[sP].[dR](T)[sP].[LR]([5meC])[sP].[LR]([5meC]) | | | |
| 1122 | 1122_454 | [LR](A)[sP].[LR](A)[sP].[dR](T)[sP].[dR](C)[sP].[dR](T)[sP].[dR](T)[sP].[dR](A)[sP]. | 47.8 | | 39.8 |
| | | [dR](T)[sP].[dR](T)[sP].[dR](T)[sP].[dR](A)[sP].[dR](C)[sP].[dR](A)[sP].[LR](T)[sP]. | | | |
| | | [dR](C)[sP].[dR](T)[sP].[LR](T)[sP].[LR]([5meC])[sP].[LR]([5meC]) | | | |
| 1122 | 1122_455 | [LR](A)[sP].[LR](A)[sP].[dR](T)[sP].[LR]([5meC])[sP].[dR](T)[sP].[dR](T)[sP].[LR](A)[sP]. | 16 | | 20.6 |
| | | [dR](T)[sP].[dR](T)[sP].[dR](T)[sP].[dR](A)[sP].[dR](C)[sP].[dR](A)[sP].[LR](T)[sP]. | | | |
| | | [dR](C)[sP].[dR](T)[sP].[dR](T)[sP].[LR]([5meC])[sP].[LR]([5meC]) | | | |
| 1122 | 1122_456 | [LR](A)[sP].[LR](A)[sP].[dR](T)[sP].[dR](C)[sP].[LR](T)[sP].[dR](T)[sP].[LR](A)[sP]. | 22.4 | | 21.5 |
| | | [dR](T)[sP].[dR](T)[sP].[dR](T)[sP].[dR](A)[sP].[dR](C)[sP].[dR](A)[sP].[dR](T)[sP]. | | | |
| | | [LR]([5meC])[sP].[dR](T)[sP].[dR](T)[sP].[LR]([5meC])[sP].[LR]([5meC]) | | | |
| 1122 | 1122_457 | [LR](A)[sP].[LR](A)[sP].[dR](T)[sP].[dR](C)[sP].[LR](T)[sP].[dR](T)[sP].[LR](A)[sP]. | 20 | | 21 |
| | | [dR](T)[sP].[dR](T)[sP].[dR](T)[sP].[dR](A)[sP].[dR](C)[sP].[dR](A)[sP].[dR](T)[sP]. | | | |
| | | [dR](C)[sP].[dR](T)[sP].[LR](T)[sP].[LR]([5meC])[sP].[LR]([5meC]) | | | |
| 1122 | 1122_458 | [LR](A)[sP].[LR](A)[sP].[dR](T)[sP].[dR](C)[sP].[dR](T)[sP].[dR](T)[sP].[dR](A)[sP]. | | 78.1 | 71.4 |
| | | [LR](T)[sP].[mR](U)[sP].[dR](T)[sP].[LR](A)[sP].[dR](C)[sP].[dR](A)[sP].[dR](T)[sP]. | | | |
| | | [dR](C)[sP].[dR](T)[sP].[dR](T)[sP].[LR]([5meC])[sP].[LR]([5meC]) | | | |
| 1122 | 1122_459 | [LR](A)[sP].[LR](A)[sP].[dR](T)[sP].[LR]([5meC])[sP].[dR](T)[sP].[mR](U)[sP].[dR](A)[sP]. | | 21.1 | 29 |
| | | [dR](T)[sP].[dR](T)[sP].[dR](T)[sP].[dR](A)[sP].[dR](C)[sP].[dR](A)[sP].[dR](T)[sP]. | | | |
| | | [dR](C)[sP].[dR](T)[sP].[LR](T)[sP].[LR]([5meC])[sP].[LR]([5meC]) | | | |
| 1122 | 1122_460 | [LR](A)[sP].[dR](A)[sP].[dR](T)[sP].[LR]([5meC])[sP].[LR](T)[sP].[dR](T)[sP].[mR](A)[sP]. | | 29.4 | 33.5 |
| | | [dR](T)[sP].[dR](T)[sP].[dR](T)[sP].[dR](A)[sP].[dR](C)[sP].[dR](A)[sP].[dR](T)[sP]. | | | |
| | | [dR](C)[sP].[LR](T)[sP].[dR](T)[sP].[LR]([5meC])[sP].[LR]([5meC]) | | | |
| 1122 | 1122_461 | [LR](A)[sP].[LR](A)[sP].[dR](T)[sP].[LR]([5meC])[sP].[LR](T)[sP].[dR](T)[sP].[mR](A)[sP]. | | 18.3 | 24.7 |
| | | [dR](T)[sP].[dR](T)[sP].[dR](T)[sP].[dR](A)[sP].[dR](C)[sP].[dR](A)[sP].[dR](T)[sP]. | | | |
| | | [dR](C)[sP].[LR](T)[sP].[dR](T)[sP].[LR]([5meC])[sP].[LR]([5meC]) | | | |
| 1122 | 1122_462 | [LR](A)[sP].[dR](A)[sP].[LR](T)[sP].[LR]([5meC])[sP].[LR](T)[sP].[dR](T)[sP].[mR](A)[sP]. | | 18.3 | 24.1 |
| | | [dR](T)[sP].[dR](T)[sP].[dR](T)[sP].[dR](A)[sP].[dR](C)[sP].[dR](A)[sP].[dR](T)[sP]. | | | |
| | | [dR](C)[sP].[LR](T)[sP].[dR](T)[sP].[LR]([5meC])[sP].[LR]([5meC]) | | | |
| 1122 | 1122_463 | [LR](A)[sP].[dR](A)[sP].[LR](T)[sP].[LR]([5meC])[sP].[dR](T)[sP].[mR](U)[sP].[dR](A)[sP]. | | 22.5 | 26.3 |
| | | [dR](T)[sP].[dR](T)[sP].[dR](T)[sP].[dR](A)[sP].[dR](C)[sP].[dR](A)[sP].[dR](T)[sP]. | | | |
| | | [dR](C)[sP].[LR](T)[sP].[dR](T)[sP].[LR]([5meC])[sP].[LR]([5meC]) | | | |
| 1122 | 1122_464 | [LR](A)[sP].[dR](A)[sP].[LR](T)[sP].[dR](C)[sP].[LR](T)[sP].[LR](T)[sP].[dR](A)[sP]. | | 32.7 | 36.1 |
| | | [mR](U)[sP].[dR](T)[sP].[dR](T)[sP].[dR](A)[sP].[dR](C)[sP].[dR](A)[sP].[dR](T)[sP]. | | | |
| | | [dR](C)[sP].[LR](T)[sP].[dR](T)[sP].[LR]([5meC])[sP].[LR]([5meC]) | | | |
| 1122 | 1122_465 | [LR](A)[sP].[dR](A)[sP].[dR](T)[sP].[LR]([5meC])[sP].[LR](T)[sP].[LR](T)[sP].[dR](A)[sP]. | | 24.8 | 29.8 |
| | | [mR](U)[sP].[dR](T)[sP].[dR](T)[sP].[dR](A)[sP].[dR](C)[sP].[dR](A)[sP].[dR](T)[sP]. | | | |
| | | [dR](C)[sP].[LR](T)[sP].[dR](T)[sP].[LR]([5meC])[sP].[LR]([5meC]) | | | |
| 1122 | 1122_466 | [LR](A)[sP].[dR](A)[sP].[dR](T)[sP].[LR]([5meC])[sP].[dR](T)[sP].[mR](U)[sP].[dR](A)[sP]. | | 18.2 | 28.3 |
| | | [dR](T)[sP].[dR](T)[sP].[dR](T)[sP].[dR](A)[sP].[dR](C)[sP].[dR](A)[sP].[dR](T)[sP]. | | | |
| | | [dR](C)[sP].[LR](T)[sP].[LR](T)[sP].[LR]([5meC])[sP].[LR]([5meC]) | | | |
| 1122 | 1122_467 | [LR](A)[sP].[dR](A)[sP].[dR](T)[sP].[LR]([5meC])[sP].[dR](T)[sP].[LR](T)[sP].[dR](A)[sP]. | | 38.1 | 37.5 |
| | | [mR](U)[sP].[dR](T)[sP].[dR](T)[sP].[dR](A)[sP].[dR](C)[sP].[dR](A)[sP].[dR](T)[sP]. | | | |
| | | [dR](C)[sP].[LR](T)[sP].[dR](T)[sP].[LR]([5meC])[sP].[LR]([5meC]) | | | |
| 1122 | 1122_468 | [LR](A)[sP].[dR](A)[sP].[dR](T)[sP].[dR](C)[sP].[LR](T)[sP].[LR](T)[sP].[dR](A)[sP]. | | 45.5 | 43.1 |
| | | [mR](U)[sP].[dR](T)[sP].[dR](T)[sP].[dR](A)[sP].[dR](C)[sP].[dR](A)[sP].[dR](T)[sP]. | | | |
| | | [dR](C)[sP].[LR](T)[sP].[dR](T)[sP].[LR]([5meC])[sP].[LR]([5meC]) | | | |
| 1122 | 1122_469 | [LR](A)[sP].[dR](A)[sP].[dR](T)[sP].[LR]([5meC])[sP].[LR](T)[sP].[LR](T)[sP].[dR](A)[sP]. | | 27.2 | 28.9 |
| | | [mR](U)[sP].[dR](T)[sP].[dR](T)[sP].[dR](A)[sP].[dR](C)[sP].[dR](A)[sP].[dR](T)[sP]. | | | |
| | | [dR](C)[sP].[dR](T)[sP].[dR](T)[sP].[LR]([5meC])[sP].[LR]([5meC]) | | | |
| 1122 | 1122_470 | [LR](A)[sP].[LR](A)[sP].[dR](T)[sP].[LR]([5meC])[sP].[LR](T)[sP].[dR](T)[sP].[mR](A)[sP]. | 11.2 | 12.2 | 20.2 |
| | | [dR](T)[sP].[dR](T)[sP].[dR](T)[sP].[dR](A)[sP].[dR](C)[sP].[dR](A)[sP].[dR](T)[sP]. | | | |
| | | [dR](C)[sP].[dR](T)[sP].[LR](T)[sP].[LR]([5meC])[sP].[LR]([5meC]) | | | |
| 1122 | 1122_471 | [LR](A)[sP].[LR](A)[sP].[dR](T)[sP].[LR]([5meC])[sP].[dR](T)[sP].[LR](T)[sP].[dR](A)[sP]. | | 30.6 | 37.3 |
| | | [mR](U)[sP].[dR](T)[sP].[dR](T)[sP].[dR](A)[sP].[dR](C)[sP].[dR](A)[sP].[dR](T)[sP]. | | | |
| | | [dR](C)[sP].[LR](T)[sP].[dR](T)[sP].[LR]([5meC])[sP].[LR]([5meC]) | | | |
| 1122 | 1122_472 | [LR](A)[sP].[dR](A)[sP].[dR](T)[sP].[dR](C)[sP].[LR](T)[sP].[LR](T)[sP].[dR](A)[sP]. | | 51.1 | 44.7 |
| | | [mR](U)[sP].[dR](T)[sP].[dR](T)[sP].[dR](A)[sP].[dR](C)[sP].[dR](A)[sP].[dR](T)[sP]. | | | |
| | | [LR]([5meC])[sP].[dR](T)[sP].[dR](T)[sP].[LR]([5meC])[sP].[LR]([5meC]) | | | |
| 1122 | 1122_473 | [LR](A)[sP].[dR](A)[sP].[LR](T)[sP].[dR](C)[sP].[LR](T)[sP].[dR](T)[sP].[mR](A)[sP]. | | 19 | 27.6 |
| | | [dR](T)[sP].[dR](T)[sP].[dR](T)[sP].[dR](A)[sP].[dR](C)[sP].[dR](A)[sP].[dR](T)[sP]. | | | |
| | | [dR](C)[sP].[LR](T)[sP].[LR](T)[sP].[LR]([5meC])[sP].[LR]([5meC]) | | | |
| 1122 | 1122_474 | [LR](A)[sP].[LR](A)[sP].[LR](T)[sP].[dR](C)[sP].[LR](T)[sP].[dR](T)[sP].[mR](A)[sP]. | | 20.7 | 28.3 |
| | | [dR](T)[sP].[dR](T)[sP].[dR](T)[sP].[dR](A)[sP].[dR](C)[sP].[dR](A)[sP].[dR](T)[sP]. | | | |
| | | [dR](C)[sP].[LR](T)[sP].[dR](T)[sP].[LR]([5meC])[sP].[LR]([5meC]) | | | |
| 1122 | 1122_475 | [LR](A)[sP].[LR](A)[sP].[dR](T)[sP].[LR]([5meC])[sP].[LR](T)[sP].[LR](T)[sP].[dR](A)[sP]. | | 22.5 | 29.6 |
| | | [mR](U)[sP].[dR](T)[sP].[dR](T)[sP].[dR](A)[sP].[dR](C)[sP].[dR](A)[sP].[dR](T)[sP]. | | | |
| | | [dR](C)[sP].[dR](T)[sP].[dR](T)[sP].[LR]([5meC])[sP].[LR]([5meC]) | | | |
| 1122 | 1122_476 | [LR](A)[sP].[dR](A)[sP].[dR](T)[sP].[LR]([5meC])[sP].[LR](T)[sP].[dR](T)[sP].[mR](A)[sP]. | | 22.4 | 25.7 |
| | | [dR](T)[sP].[dR](T)[sP].[dR](T)[sP].[dR](A)[sP].[dR](C)[sP].[dR](A)[sP].[dR](T)[sP]. | | | |
| | | [dR](C)[sP].[dR](T)[sP].[LR](T)[sP].[LR]([5meC])[sP].[LR]([5meC]) | | | |
| 1122 | 1122_477 | [LR](A)[sP].[LR](A)[sP].[dR](T)[sP].[dR](C)[sP].[dR](T)[sP].[dR](T)[sP].[dR](A)[sP]. | | 63.7 | 66.2 |
| | | [LR](T)[sP].[LR](T)[sP].[mR](U)[sP].[LR](A)[sP].[dR](C)[sP].[dR](A)[sP].[dR](T)[sP]. | | | |
| | | [dR](C)[sP].[dR](T)[sP].[dR](T)[sP].[LR]([5meC])[sP].[LR]([5meC]) | | | |
| 1122 | 1122_478 | [LR](A)[sP].[LR](A)[sP].[dR](T)[sP].[dR](C)[sP].[dR](T)[sP].[dR](T)[sP].[dR](A)[sP]. | | 80.1 | 78.7 |
| | | [LR](T)[sP].[LR](T)[sP].[dR](T)[sP].[mR](A)[sP].[dR](C)[sP].[dR](A)[sP].[dR](T)[sP]. | | | |
| | | [dR](C)[sP].[dR](T)[sP].[dR](T)[sP].[LR]([5meC])[sP].[LR]([5meC]) | | | |
| 1122 | 1122_479 | [LR](A)[sP].[LR](A)[sP].[dR](T)[sP].[dR](C)[sP].[dR](T)[sP].[dR](T)[sP].[dR](A)[sP]. | | 68.7 | 64.1 |
| | | [LR](T)[sP].[LR](T)[sP].[mR](U)[sP].[dR](A)[sP].[dR](C)[sP].[dR](A)[sP].[dR](T)[sP]. | | | |
| | | [dR](C)[sP].[dR](T)[sP].[dR](T)[sP].[LR]([5meC])[sP].[LR]([5meC]) | | | |
| 1122 | 1122_480 | [LR](A)[sP].[LR](A)[sP].[dR](T)[sP].[dR](C)[sP].[dR](T)[sP].[dR](T)[sP].[dR](A)[sP]. | | 75.9 | 71.1 |
| | | [mR](U)[sP].[LR](T)[sP].[dR](T)[sP].[LR](A)[sP].[dR](C)[sP].[dR](A)[sP].[dR](T)[sP]. | | | |
| | | [dR](C)[sP].[dR](T)[sP].[dR](T)[sP].[LR]([5meC])[sP].[LR]([5meC]) | | | |
| 1122 | 1122_481 | [LR](A)[sP].[mR](A)[sP].[dR](T)[sP].[LR]([5meC])[sP].[LR](T)[sP].[LR](T)[sP].[dR](A)[sP]. | 12.4 | 10.3 | 20 |
| | | [dR](T)[sP].[dR](T)[sP].[dR](T)[sP].[dR](A)[sP].[dR](C)[sP].[dR](A)[sP].[dR](T)[sP]. | | | |
| | | [dR](C)[sP].[LR](T)[sP].[dR](T)[sP].[LR]([5meC])[sP].[LR]([5meC]) | | | |
| 1122 | 1122_482 | [LR](A)[sP].[dR](A)[sP].[mR](U)[sP].[LR]([5meC])[sP].[LR](T)[sP].[LR](T)[sP].[dR](A)[sP]. | 10.3 | 9.21 | 19.1 |
| | | [dR](T)[sP].[dR](T)[sP].[dR](T)[sP].[dR](A)[sP].[dR](C)[sP].[dR](A)[sP].[dR](T)[sP]. | | | |
| | | [dR](C)[sP].[LR](T)[sP].[dR](T)[sP].[LR]([5meC])[sP].[LR]([5meC]) | | | |
| 1122 | 1122_483 | [LR](A)[sP].[dR](A)[sP].[dR](T)[sP].[LR]([5meC])[sP].[LR](T)[sP].[LR](T)[sP].[dR](A)[sP]. | | 8.02 | 21.5 |
| | | [dR](T)[sP].[dR](T)[sP].[dR](T)[sP].[dR](A)[sP].[dR](C)[sP].[dR](A)[sP].[dR](T)[sP]. | | | |
| | | [dR](C)[sP].[LR](T)[sP].[mR](U)[sP].[LR]([5meC])[sP].[LR]([5meC]) | | | |
| 1122 | 1122_484 | [LR](A)[sP].[mR](A)[sP].[mR](U)[sP].[LR]([5meC])[sP].[LR](T)[sP].[LR](T)[sP].[dR](A)[sP]. | 12.7 | 11.5 | 21.4 |
| | | [dR](T)[sP].[dR](T)[sP].[dR](T)[sP].[dR](A)[sP].[dR](C)[sP].[dR](A)[sP].[dR](T)[sP]. | | | |
| | | [dR](C)[sP].[LR](T)[sP].[dR](T)[sP].[LR]([5meC])[sP].[LR]([5meC]) | | | |
| 1122 | 1122_485 | [LR](A)[sP].[dR](A)[sP].[LR](T)[sP].[LR]([5meC])[sP].[dR](T)[sP].[mR](U)[sP].[dR](A)[sP]. | | 20.4 | 28.8 |
| | | [dR](T)[sP].[dR](T)[sP].[dR](T)[sP].[dR](A)[sP].[dR](C)[sP].[dR](A)[sP].[dR](T)[sP]. | | | |
| | | [dR](C)[sP].[dR](T)[sP].[LR](T)[sP].[LR]([5meC])[sP].[LR]([5meC]) | | | |
| 1122 | 1122_486 | [LR](A)[sP].[LR](A)[sP].[dR](T)[sP].[LR]([5meC])[sP].[dR](T)[sP].[mR](U)[sP].[dR](A)[sP]. | | 24.7 | 31.3 |
| | | [dR](T)[sP].[dR](T)[sP].[dR](T)[sP].[dR](A)[sP].[dR](C)[sP].[dR](A)[sP].[dR](T)[sP]. | | | |
| | | [dR](C)[sP].[LR](T)[sP].[dR](T)[sP].[LR]([5meC])[sP].[LR]([5meC]) | | | |
| 1122 | 1122_487 | [LR](A)[sP].[LR](A)[sP].[dR](T)[sP].[dR](C)[sP].[dR](T)[sP].[dR](T)[sP].[dR](A)[sP]. | | 82.9 | 79.3 |
| | | [mR](U)[sP].[mR](U)[sP].[dR](T)[sP].[LR](A)[sP].[dR](C)[sP].[dR](A)[sP].[dR](T)[sP]. | | | |
| | | [dR](C)[sP].[dR](T)[sP].[dR](T)[sP].[LR]([5meC])[sP].[LR]([5meC]) | | | |
| 1122 | 1122_488 | [LR](A)[sP].[mR](A)[sP].[dR](T)[sP].[LR]([5meC])[sP].[mR](U)[sP].[mR](U)[sP].[dR](A)[sP]. | 35.2 | | 30.2 |
| | | [dR](T)[sP].[dR](T)[sP].[dR](T)[sP].[dR](A)[sP].[dR](C)[sP].[dR](A)[sP].[dR](T)[sP]. | | | |
| | | [dR](C)[sP].[LR](T)[sP].[dR](T)[sP].[LR]([5meC])[sP].[LR]([5meC]) | | | |
| 1122 | 1122_489 | [LR](A)[sP].[mR](A)[sP].[dR](T)[sP].[LR]([5meC])[sP].[LR](T)[sP].[LR](T)[sP].[dR](A)[sP]. | 29.5 | | 28.8 |
| | | [mR](U)[sP].[dR](T)[sP].[dR](T)[sP].[dR](A)[sP].[dR](C)[sP].[dR](A)[sP].[dR](T)[sP]. | | | |
| | | [dR](C)[sP].[LR](T)[sP].[dR](T)[sP].[LR]([5meC])[sP].[LR]([5meC]) | | | |
| 1122 | 1122_490 | [LR](A)[sP].[dR](A)[sP].[mR](U)[sP].[LR]([5meC])[sP].[LR](T)[sP].[LR](T)[sP].[dR](A)[sP]. | 27.3 | | 29.2 |
| | | [mR](U)[sP].[dR](T)[sP].[dR](T)[sP].[dR](A)[sP].[dR](C)[sP].[dR](A)[sP].[dR](T)[sP]. | | | |
| | | [dR](C)[sP].[LR](T)[sP].[dR](T)[sP].[LR]([5meC])[sP].[LR]([5meC]) | | | |
| 1122 | 1122_491 | [LR](A)[sP].[mR](A)[sP].[mR](U)[sP].[LR]([5meC])[sP].[LR](T)[sP].[LR](T)[sP].[dR](A)[sP]. | 31 | | 32.2 |
| | | [mR](U)[sP].[dR](T)[sP].[dR](T)[sP].[dR](A)[sP].[dR](C)[sP].[dR](A)[sP].[dR](T)[sP]. | | | |
| | | [dR](C)[sP].[LR](T)[sP].[dR](T)[sP].[LR]([5meC])[sP].[LR]([5meC]) | | | |
| 1122 | 1122_492 | [LR](A)[sP].[LR](A)[sP].[dR](T)[sP].[LR]([5meC])[sP].[LR](T)[sP].[mR](U)[sP].[mR](A)[sP]. | 9.21 | | 16.2 |
| | | [dR](T)[sP].[dR](T)[sP].[dR](T)[sP].[dR](A)[sP].[dR](C)[sP].[dR](A)[sP].[dR](T)[sP]. | | | |
| | | [dR](C)[sP].[dR](T)[sP].[LR](T)[sP].[LR]([5meC])[sP].[LR]([5meC]) | | | |
| 1122 | 1122_493 | [LR](A)[sP].[dR](A)[sP].[mR](U)[sP].[dR](C)[sP].[dR](T)[sP].[dR](T)[sP].[dR](A)[sP]. | 67.3 | | 53.7 |
| | | [dR](T)[sP].[dR](T)[sP].[dR](T)[sP].[dR](A)[sP].[dR](C)[sP].[dR](A)[sP].[dR](T)[sP]. | | | |
| | | [dR](C)[sP].[dR](T)[sP].[LR](T)[sP].[LR]([5meC])[sP].[LR]([5meC]) | | | |
| 1123 | 1123_3 | [LR]([5meC])[sP].[LR]([5meC])[sP].[dR](A)[sP].[LR](A)[sP].[dR](A)[sP].[dR](A)[sP]. | | 44.3 | 40 |
| | | [LR](T)[sP].[dR](T)[sP].[dR](A)[sP].[LR]([5meC])[sP].[dR](T)[sP].[LR](T)[sP]. | | | |
| | | [dR](C)[sP].[dR](T)[sP].[dR](T)[sP].[dR](T)[sP].[dR](T)[sP].[dR](A)[sP].[LR](T)[sP]. | | | |
| | | [LR]([5meC]) | | | |
| 1123 | 1123_4 | [LR]([5meC])[sP].[LR]([5meC])[sP].[dR](A)[sP].[dR](A)[sP].[dR](A)[sP].[LR](A)[sP]. | | 59.3 | 49.9 |
| | | [LR](T)[sP].[LR](T)[sP].[dR](A)[sP].[dR](C)[sP].[dR](T)[sP].[dR](T)[sP].[dR](C)[sP]. | | | |
| | | [dR](T)[sP].[dR](T)[sP].[dR](T)[sP].[dR](T)[sP].[dR](A)[sP].[LR](T)[sP].[LR]([5meC]) | | | |
| 1123 | 1123_5 | [LR]([5meC])[sP].[LR]([5meC])[sP].[LR](A)[sP].[dR](A)[sP].[dR](A)[sP].[dR](A)[sP]. | | 26.4 | 30.6 |
| | | [dR](T)[sP].[dR](T)[sP].[dR](A)[sP].[dR](C)[sP].[dR](T)[sP].[LR](T)[sP].[dR](C)[sP]. | | | |
| | | [dR](T)[sP].[dR](T)[sP].[dR](T)[sP].[LR](T)[sP].[dR](A)[sP].[LR](T)[sP].[LR]([5meC]) | | | |
| 1123 | 1123_6 | [LR]([5meC])[sP].[LR]([5meC])[sP].[dR](A)[sP].[dR](A)[sP].[LR](A)[sP].[dR](A)[sP]. | | 98.1 | 90.7 |
| | | [LR](T)[sP].[LR](T)[sP].[dR](A)[sP].[dR](C)[sP].[dR](T)[sP].[dR](T)[sP].[dR](C)[sP]. | | | |
| | | [dR](T)[sP].[LR](T)[sP].[LR](T)[sP].[dR](T)[sP].[LR](A)[sP].[LR](T)[sP].[LR]([5meC]) | | | |
| 1191 | 1191_3 | [LR]([5meC])[sP].[LR]([5meC])[sP].[dR](A)[sP].[LR](T)[sP].[LR](T)[sP].[dR](C)[sP]. | | 89.1 | 90.4 |
| | | [dR](A)[sP].[dR](A)[sP].[dR](A)[sP].[dR](T)[sP].[dR](A)[sP].[dR](T)[sP].[LR](A)[sP]. | | | |
| | | [dR](T)[sP].[LR](A)[sP].[dR](C)[sP].[dR](A)[sP].[dR](T)[sP].[dR](T)[sP].[LR](T)[sP].[LR](T) | | | |
| 1191 | 1191_4 | [LR]([5meC])[sP].[LR]([5meC])[sP].[LR](A)[sP].[dR](T)[sP].[dR](T)[sP].[LR]([5meC])[sP]. | | 53.1 | 59.8 |
| | | [dR](A)[sP].[dR](A)[sP].[LR](A)[sP].[dR](T)[sP].[dR](A)[sP].[dR](T)[sP].[dR](A)[sP]. | | | |
| | | [dR](T)[sP].[dR](A)[sP].[dR](C)[sP].[LR](A)[sP].[dR](T)[sP].[dR](T)[sP].[LR](T)[sP].[LR](T) | | | |
| 1191 | 1191_5 | [LR]([5meC])[sP].[LR]([5meC])[sP].[LR](A)[sP].[dR](T)[sP].[dR](T)[sP].[LR]([5meC])[sP]. | | 55 | 64.3 |
| | | [LR](A)[sP].[LR](A)[sP].[LR](A)[sP].[dR](T)[sP].[dR](A)[sP].[dR](T)[sP].[dR](A)[sP]. | | | |
| | | [dR](T)[sP].[dR](A)[sP].[dR](C)[sP].[dR](A)[sP].[dR](T)[sP].[LR](T)[sP].[LR](T)[sP].[LR](T) | | | |
| 1192 | 1192_2 | [LR](T)[sP].[LR]([5meC])[sP].[dR](C)[sP].[dR](A)[sP].[dR](T)[sP].[dR](T)[sP].[dR](C)[sP]. | | 78.5 | 84.6 |
| | | [dR](A)[sP].[dR](A)[sP].[LR](A)[sP].[dR](T)[sP].[dR](A)[sP].[dR](T)[sP].[LR](A)[sP]. | | | |
| | | [LR](T)[sP].[LR](A)[sP].[dR](C)[sP].[dR](A)[sP].[dR](T)[sP].[LR](T)[sP].[LR](T) | | | |
| 1192 | 1192_3 | [LR](T)[sP].[LR]([5meC])[sP].[LR]([5meC])[sP].[dR](A)[sP].[LR](T)[sP].[dR](T)[sP]. | | 93.3 | 85.8 |
| | | [dR](C)[sP]. [LR](A)[sP].[LR](A)[sP].[LR](A)[sP].[dR](T)[sP].[dR](A)[sP].[dR](T)[sP]. | | | |
| | | [dR](A)[sP].[dR](T)[sP]. [dR](A)[sP].[dR](C)[sP].[LR](A)[sP].[LR](T)[sP].[LR](T)[sP].[LR](T) | | | |
| 1193 | 1193_3 | [LR](A)[sP].[LR](T)[sP].[dR](C)[sP].[dR](C)[sP].[LR](A)[sP].[LR](T)[sP].[LR](T)[sP]. | | 92 | 92 |
| | | [dR](C)[sP].[dR](A)[sP].[dR](A)[sP].[dR](A)[sP].[dR](T)[sP].[dR](A)[sP].[LR](T)[sP]. | | | |
| | | [dR](A)[sP].[dR](T)[sP].[LR](A)[sP].[dR](C)[sP].[dR](A)[sP].[LR](T)[sP].[LR](T) | | | |
| 1194 | 1194_2 | [LR](T)[sP].[LR]([5meC])[sP].[dR](C)[sP].[LR](A)[sP].[dR](T)[sP].[dR](T)[sP]. | | 64.2 | 69.6 |
| | | [LR]([5meC])[sP].[LR](A)[sP].[LR](A)[sP].[dR](A)[sP].[dR](T)[sP].[dR](A)[sP]. | | | |
| | | [dR](T)[sP].[dR](A)[sP].[dR](T)[sP].[LR](A)[sP].[LR]([5meC])[sP].[dR](A)[sP]. | | | |
| | | [LR](T)[sP].[LR](T) | | | |
| 1195 | 1195_2 | [LR](T)[sP].[LR](A)[sP].[LR](T)[sP].[dR](C)[sP].[dR](C)[sP].[dR](A)[sP].[dR](T)[sP]. | | 79.3 | 81.5 |
| | | [dR](T)[sP].[dR](C)[sP].[LR](A)[sP].[dR](A)[sP].[dR](A)[sP].[dR](T)[sP].[dR](A)[sP]. | | | |
| | | [LR](T)[sP].[dR](A)[sP].[dR](T)[sP].[LR](A)[sP].[LR]([5meC])[sP].[LR](A)[sP].[LR](T) | | | |
| 1195 | 1195_3 | [LR](T)[sP].[LR](A)[sP].[LR](T)[sP].[dR](C)[sP].[dR](C)[sP].[LR](A)[sP].[dR](T)[sP]. | | 75.5 | 82.2 |
| | | [dR](T)[sP].[dR](C)[sP].[LR](A)[sP].[dR](A)[sP].[dR](A)[sP].[dR](T)[sP].[dR](A)[sP]. | | | |
| | | [dR](T)[sP].[dR](A)[sP].[LR](T)[sP].[dR](A)[sP].[LR]([5meC])[sP].[LR](A)[sP].[LR](T) | | | |
| 1195 | 1195_4 | [LR](T)[sP].[LR](A)[sP].[LR](T)[sP].[dR](C)[sP].[dR](C)[sP].[dR](A)[sP].[dR](T)[sP]. | | 81.6 | 89 |
| | | [dR](T)[sP].[dR](C)[sP].[LR](A)[sP].[dR](A)[sP].[dR](A)[sP].[dR](T)[sP].[dR](A)[sP]. | | | |
| | | [LR](T)[sP].[LR](A)[sP].[dR](T)[sP].[dR](A)[sP].[LR]([5meC])[sP].[LR](A)[sP].[LR](T) | | | |
| 1196 | 1196_2 | [LR](T)[sP].[LR]([5meC])[sP].[LR]([5meC])[sP].[dR](A)[sP].[dR](T)[sP].[dR](T)[sP]. | | 52.8 | 68.1 |
| | | [dR](C)[sP].[dR](A)[sP].[LR](A)[sP].[dR](A)[sP].[dR](T)[sP].[dR](A)[sP].[dR](T)[sP]. | | | |
| | | [dR](A)[sP].[dR](T)[sP].[dR](A)[sP].[LR]([5meC])[sP].[LR](A)[sP].[LR](T) | | | |
| 1197 | 1197_2 | [LR](A)[sP].[LR](T)[sP].[dR](C)[sP].[dR](C)[sP].[dR](A)[sP].[dR](T)[sP].[dR](T)[sP]. | | 94 | 83.4 |
| | | [dR](C)[sP].[dR](A)[sP].[dR](A)[sP].[dR](A)[sP].[LR](T)[sP].[LR](A)[sP].[LR](T)[sP]. | | | |
| | | [dR](A)[sP].[dR](T)[sP].[LR](A)[sP].[LR]([5meC])[sP].[LR](A) | | | |
| 1197 | 1197_3 | [LR](A)[sP].[LR](T)[sP].[LR]([5meC])[sP].[dR](C)[sP].[dR](A)[sP].[LR](T)[sP].[dR](T)[sP]. | | 90.5 | 87.3 |
| | | [dR](C)[sP].[dR](A)[sP].[LR](A)[sP].[dR](A)[sP].[dR](T)[sP].[LR](A)[sP].[LR](T)[sP]. | | | |
| | | [LR](A)[sP].[dR](T)[sP].[dR](A)[sP].[LR]([5meC])[sP].[LR](A) | | | |
| 1198 | 1198_2 | [LR](T)[sP].[LR](T)[sP].[dR](A)[sP].[LR](T)[sP].[dR](C)[sP].[LR]([5meC])[sP].[dR](A)[sP]. | | 91 | 91.2 |
| | | [LR](T)[sP].[LR](T)[sP].[dR](C)[sP].[dR](A)[sP].[dR](A)[sP].[dR](A)[sP].[dR](T)[sP]. | | | |
| | | [dR](A)[sP].[LR](T)[sP].[dR](A)[sP].[dR](T)[sP].[dR](A)[sP].[LR]([5meC])[sP].[LR](A) | | | |
| 1202 | 1202_2 | [LR](T)[sP].[LR]([5meC])[sP].[dR](T)[sP].[dR](T)[sP].[dR](T)[sP].[dR](A)[sP].[dR](T)[sP]. | | 78 | 76 |
| | | [dR](C)[sP].[dR](C)[sP].[LR](A)[sP].[dR](T)[sP].[dR](T)[sP].[dR](C)[sP].[LR](A)[sP]. | | | |
| | | [LR](A)[sP].[LR](A)[sP].[dR](T)[sP].[dR](A)[sP].[LR](T)[sP].[LR](A)[sP].[LR](T) | | | |
| 1204 | 1204_2 | [LR](T)[sP].[LR]([5meC])[sP].[LR](T)[sP].[dR](T)[sP].[LR](T)[sP].[dR](A)[sP].[dR](T)[sP]. | | 87.5 | 85.8 |
| | | [dR](C)[sP].[dR](C)[sP].[dR](A)[sP].[dR](T)[sP].[dR](T)[sP].[dR](C)[sP].[LR](A)[sP]. | | | |
| | | [LR](A)[sP].[LR](A)[sP].[dR](T)[sP].[dR](A)[sP].[LR](T)[sP].[LR](A) | | | |
| 1399 | 1399_2 | [LR](T)[sP].[LR](A)[sP].[LR](A)[sP].[LR](T)[sP].[dR](C)[sP].[dR](C)[sP].[dR](T)[sP]. | | 76.1 | 79.4 |
| | | [dR](A)[sP].[dR](A)[sP].[dR](T)[sP].[dR](T)[sP].[dR](T)[sP].[dR](A)[sP].[dR](A)[sP]. | | | |
| | | [dR](C)[sP].[LR]([5meC])[sP].[dR](C)[sP].[dR](A)[sP].[dR](C)[sP].[LR](A)[sP].[LR](A) | | | |
| 1399 | 1399_3 | [LR](T)[sP].[LR](A)[sP].[LR](A)[sP].[dR](T)[sP].[dR](C)[sP].[LR]([5meC])[sP].[LR](T)[sP]. | | 52.5 | 68.1 |
| | | [dR](A)[sP].[LR](A)[sP].[dR](T)[sP].[dR](T)[sP].[dR](T)[sP].[dR](A)[sP].[dR](A)[sP]. | | | |
| | | [dR](C)[sP].[dR](C)[sP].[LR]([5meC])[sP].[dR](A)[sP].[dR](C)[sP].[LR](A)[sP].[LR](A) | | | |
| 1399 | 1399_4 | [LR](T)[sP].[LR](A)[sP].[dR](A)[sP].[LR](T)[sP].[LR]([5meC])[sP].[dR](C)[sP].[LR](T)[sP]. | | 64.6 | 67.7 |
| | | [dR](A)[sP].[dR](A)[sP].[dR](T)[sP].[dR](T)[sP].[dR](T)[sP].[dR](A)[sP].[dR](A)[sP]. | | | |
| | | [dR](C)[sP].[dR](C)[sP].[dR](C)[sP].[dR](A)[sP].[dR](C)[sP].[LR](A)[sP].[LR](A) | | | |
| 1401 | 1401_2 | [LR](A)[sP].[LR](A)[sP].[dR](T)[sP].[LR]([5meC])[sP].[dR](C)[sP].[dR](T)[sP].[dR](A)[sP]. | | 90.7 | 94.9 |
| | | [dR](A)[sP].[dR](T)[sP].[dR](T)[sP].[dR](T)[sP].[LR](A)[sP].[LR](A)[sP].[LR]([5meC])[sP]. | | | |
| | | [dR](C)[sP].[LR]([5meC])[sP].[dR](A)[sP].[LR]([5meC])[sP].[LR](A) | | | |
| 1422 | 1422_3 | [LR](A)[sP].[LR](A)[sP].[dR](C)[sP].[LR](A)[sP].[dR](T)[sP].[dR](C)[sP].[dR](A)[sP]. | | 63.7 | 61.2 |
| | | [LR](T)[sP].[LR](T)[sP].[LR](T)[sP].[dR](A)[sP].[dR](T)[sP].[dR](C)[sP].[dR](A)[sP]. | | | |
| | | [dR](C)[sP].[dR](T)[sP].[LR](A)[sP].[dR](C)[sP].[LR]([5meC])[sP].[LR](A) | | | |
| 1423 | 1423_2 | [LR]([5meC])[sP].[LR](A)[sP].[LR](T)[sP].[dR](C)[sP].[dR](A)[sP].[dR](T)[sP].[dR](T)[sP]. | | 61.3 | 73.3 |
| | | [dR](T)[sP].[dR](A)[sP].[dR](T)[sP].[dR](C)[sP].[LR](A)[sP].[dR](C)[sP].[dR](T)[sP]. | | | |
| | | [dR](A)[sP].[LR]([5meC])[sP].[LR]([5meC])[sP].[LR](A) | | | |
| 1424 | 1424_3 | [LR](T)[sP].[LR](A)[sP].[dR](A)[sP].[dR](C)[sP].[dR](A)[sP].[dR](T)[sP].[dR](C)[sP]. | | 87.1 | 86.1 |
| | | [dR](A)[sP].[dR](T)[sP].[LR](T)[sP].[dR](T)[sP].[dR](A)[sP].[LR](T)[sP].[dR](C)[sP]. | | | |
| | | [LR](A)[sP].[dR](C)[sP].[dR](T)[sP].[LR](A)[sP].[dR](C)[sP].[LR]([5meC])[sP].[LR](A) | | | |
| 1426 | 1426_2 | [LR](T)[sP].[LR](A)[sP].[dR](A)[sP].[dR](C)[sP].[LR](A)[sP].[dR](T)[sP].[dR](C)[sP]. | | 74.8 | 76.7 |
| | | [dR](A)[sP].[dR](T)[sP].[dR](T)[sP].[dR](T)[sP].[dR](A)[sP].[dR](T)[sP].[dR](C)[sP]. | | | |
| | | [LR](A)[sP].[dR](C)[sP].[LR](T)[sP].[dR](A)[sP].[LR]([5meC])[sP].[LR]([5meC]) | | | |
| 1426 | 1426_3 | [LR](T)[sP].[LR](A)[sP].[dR](A)[sP].[dR](C)[sP].[dR](A)[sP].[dR](T)[sP].[dR](C)[sP]. | | 77.6 | 80.1 |
| | | [dR](A)[sP].[dR](T)[sP].[dR](T)[sP].[dR](T)[sP].[dR](A)[sP].[LR](T)[sP].[dR](C)[sP]. | | | |
| | | [LR](A)[sP].[dR](C)[sP].[LR](T)[sP].[dR](A)[sP].[LR]([5meC])[sP].[LR]([5meC]) | | | |
| 1429 | 1429_2 | [LR](A)[sP].[LR](A)[sP].[LR]([5meC])[sP].[dR](A)[sP].[dR](T)[sP].[dR](C)[sP].[dR](A)[sP]. | | 73.1 | 71.5 |
| | | [LR](T)[sP].[dR](T)[sP].[dR](T)[sP].[LR](A)[sP].[dR](T)[sP].[dR](C)[sP].[dR](A)[sP]. | | | |
| | | [dR](C)[sP].[dR](T)[sP].[dR](A)[sP].[LR]([5meC])[sP].[LR]([5meC]) | | | |
| 1432 | 1432_3 | [LR](A)[sP].[LR](T)[sP].[dR](T)[sP].[LR](A)[sP].[dR](A)[sP].[dR](C)[sP].[dR](A)[sP]. | | 74.8 | 85.5 |
| | | [dR](T)[sP].[dR](C)[sP].[dR](A)[sP].[dR](T)[sP].[dR](T)[sP].[dR](T)[sP].[dR](A)[sP]. | | | |
| | | [dR](T)[sP].[LR]([5meC])[sP].[dR](A)[sP].[LR]([5meC])[sP].[LR](T)[sP].[LR](A)[sP]. | | | |
| | | [LR]([5meC]) | | | |
| 1433 | 1433_2 | [LR](A)[sP].[LR](T)[sP].[dR](T)[sP].[dR](A)[sP].[dR](A)[sP].[dR](C)[sP].[dR](A)[sP]. | | 95.9 | 90.5 |
| | | [dR](T)[sP].[dR](C)[sP].[LR](A)[sP].[LR](T)[sP].[dR](T)[sP].[LR](T)[sP].[LR](A)[sP]. | | | |
| | | [dR](T)[sP].[dR](C)[sP].[LR](A)[sP].[dR](C)[sP].[LR](T)[sP].[LR](A) | | | |
| 1433 | 1433_3 | [LR](A)[sP].[LR](T)[sP].[LR](T)[sP].[dR](A)[sP].[dR](A)[sP].[dR](C)[sP].[dR](A)[sP]. | | 83.3 | 81.5 |
| | | [dR](T)[sP].[dR](C)[sP].[dR](A)[sP].[dR](T)[sP].[LR](T)[sP].[LR](T)[sP].[LR](A)[sP]. | | | |
| | | [dR](T)[sP].[dR](C)[sP].[LR](A)[sP].[dR](C)[sP].[LR](T)[sP].[LR](A) | | | |
| 1433 | 1433_4 | [LR](A)[sP].[LR](T)[sP].[dR](T)[sP].[LR](A)[sP].[LR](A)[sP].[dR](C)[sP].[LR](A)[sP]. | | 90.8 | 88.4 |
| | | [dR](T)[sP].[dR](C)[sP].[LR](A)[sP].[LR](T)[sP].[dR](T)[sP].[dR](T)[sP].[dR](A)[sP]. | | | |
| | | [dR](T)[sP].[dR](C)[sP].[dR](A)[sP].[LR]([5meC])[sP].[LR](T)[sP].[LR](A) | | | |
| 1435 | 1435_3 | [LR](T)[sP].[LR](A)[sP].[dR](A)[sP].[LR](T)[sP].[LR](T)[sP].[LR](A)[sP].[LR](A)[sP]. | | 101 | 91.4 |
| | | [dR](C)[sP].[LR](A)[sP].[dR](T)[sP].[dR](C)[sP].[dR](A)[sP].[dR](T)[sP].[dR](T)[sP]. | | | |
| | | [dR](T)[sP].[dR](A)[sP].[dR](T)[sP].[dR](C)[sP].[LR](A)[sP].[LR]([5meC])[sP].[LR](T) | | | |
| 1436 | 1436_3 | [LR]([5meC])[sP].[LR](T)[sP].[dR](A)[sP].[dR](A)[sP].[LR](T)[sP].[dR](T)[sP].[dR](A)[sP]. | | 89.4 | 82.3 |
| | | [dR](A)[sP].[dR](C)[sP].[dR](A)[sP].[dR](T)[sP].[dR](C)[sP].[LR](A)[sP].[LR](T)[sP]. | | | |
| | | [LR](T)[sP].[dR](T)[sP].[LR](A)[sP].[dR](T)[sP].[dR](C)[sP].[LR](A)[sP].[LR]([5meC]) | | | |
| 1436 | 1436_4 | [LR]([5meC])[sP].[LR](T)[sP].[LR](A)[sP].[dR](A)[sP].[dR](T)[sP].[LR](T)[sP].[dR](A)[sP]. | | 89.6 | 75.6 |
| | | [LR](A)[sP].[LR]([5meC])[sP].[dR](A)[sP].[dR](T)[sP].[dR](C)[sP].[dR](A)[sP].[dR](T)[sP]. | | | |
| | | [dR](T)[sP].[dR](T)[sP].[dR](A)[sP].[dR](T)[sP].[dR](C)[sP].[LR](A)[sP].[LR]([5meC]) | | | |
| 1438 | 1438_2 | [LR]([5meC])[sP].[LR](T)[sP].[dR](A)[sP].[dR](A)[sP].[LR](T)[sP].[dR](T)[sP].[LR](A)[sP]. | | 77.4 | 71.1 |
| | | [LR](A)[sP].[dR](C)[sP].[dR](A)[sP].[dR](T)[sP].[dR](C)[sP].[dR](A)[sP].[dR](T)[sP]. | | | |
| | | [dR](T)[sP].[LR](T)[sP].[dR](A)[sP].[LR](T)[sP].[LR]([5meC])[sP].[LR](A) | | | |
| 1440 | 1440_2 | [LR]([5meC])[sP].[LR]([5meC])[sP].[dR](C)[sP].[dR](T)[sP].[dR](A)[sP].[dR](A)[sP]. | | 72.4 | 66 |
| | | [LR](T)[sP].[dR](T)[sP].[LR](A)[sP].[LR](A)[sP].[dR](C)[sP].[LR](A)[sP].[dR](T)[sP]. | | | |
| | | [dR](C)[sP].[dR](A)[sP].[dR](T)[sP].[dR](T)[sP].[dR](T)[sP].[LR](A)[sP].[LR](T)[sP]. | | | |
| | | [LR]([5meC]) | | | |
| 1440 | 1440_3 | [LR]([5meC])[sP].[LR]([5meC])[sP].[dR](C)[sP].[dR](T)[sP].[dR](A)[sP].[dR](A)[sP]. | | 87.5 | 93.1 |
| | | [dR](T)[sP].[dR](T)[sP].[LR](A)[sP].[LR](A)[sP].[dR](C)[sP].[dR](A)[sP].[dR](T)[sP]. | | | |
| | | [dR](C)[sP].[dR](A)[sP].[LR](T)[sP].[dR](T)[sP].[dR](T)[sP].[dR](A)[sP].[LR](T)[sP]. | | | |
| | | [LR]([5meC]) | | | |
| 1444 | 1444_2 | [LR](G)[sP].[LR]([5meC])[sP].[dR](C)[sP].[dR](C)[sP].[dR](T)[sP].[LR](A)[sP].[LR](A)[sP]. | | 71.4 | 78.6 |
| | | [dR](T)[sP].[dR](T)[sP].[dR](A)[sP].[dR](A)[sP].[dR](C)[sP].[dR](A)[sP].[dR](T)[sP]. | | | |
| | | [LR]([5meC])[sP].[LR](A)[sP].[dR](T)[sP].[LR](T)[sP].[LR](T) | | | |
| 1444 | 1444_3 | [LR](G)[sP].[LR]([5meC])[sP].[dR](C)[sP].[LR]([5meC])[sP].[dR](T)[sP].[dR](A)[sP]. | | 89.3 | 89.6 |
| | | [dR](A)[sP].[dR](T)[sP].[dR](T)[sP].[dR](A)[sP].[dR](A)[sP].[dR](C)[sP].[LR](A)[sP]. | | | |
| | | [dR](T)[sP].[dR](C)[sP].[LR](A)[sP].[dR](T)[sP].[LR](T)[sP].[LR](T) | | | |
| 1456 | 1456_2 | [LR]([5meC])[sP].[LR](A)[sP].[LR](A)[sP].[LR](A)[sP].[dR](G)[sP].[dR](T)[sP].[dR](T)[sP]. | | 62.2 | 67.5 |
| | | [dR](T)[sP].[dR](T)[sP].[dR](C)[sP].[LR]([5meC])[sP].[dR](C)[sP].[dR](A)[sP].[LR](T)[sP]. | | | |
| | | [LR](T)[sP].[LR](A)[sP].[LR]([5meC]) | | | |
| 1457 | 1457_2 | [LR](A)[sP].[LR]([5meC])[sP].[dR](A)[sP].[dR](A)[sP].[dR](A)[sP].[dR](G)[sP].[dR](T)[sP]. | | 88.3 | 88.6 |
| | | [dR](T)[sP].[dR](T)[sP].[LR](T)[sP].[LR]([5meC])[sP].[dR](C)[sP].[LR]([5meC])[sP]. | | | |
| | | [dR](A)[sP].[dR](T)[sP].[LR](T)[sP].[LR](A) | | | |
| 1457 | 1457_3 | [LR](A)[sP].[LR]([5meC])[sP].[dR](A)[sP].[dR](A)[sP].[dR](A)[sP].[dR](G)[sP].[dR](T)[sP]. | | 89.4 | 88.7 |
| | | [dR](T)[sP].[LR](T)[sP].[LR](T)[sP].[LR]([5meC])[sP].[dR](C)[sP].[dR](C)[sP].[dR](A)[sP]. | | | |
| | | [LR](T)[sP].[LR](T)[sP].[LR](A) | | | |
| 1457 | 1457_4 | [LR](A)[sP].[LR]([5meC])[sP].[LR](A)[sP].[LR](A)[sP].[dR](A)[sP].[dR](G)[sP].[LR](T)[sP]. | | 72.6 | 67.4 |
| | | [LR](T)[sP].[dR](T)[sP].[dR](T)[sP].[dR](C)[sP].[dR](C)[sP].[dR](C)[sP].[dR](A)[sP]. | | | |
| | | [dR](T)[sP].[LR](T)[sP].[LR](A) | | | |
| 1457 | 1457_5 | [LR](A)[sP].[LR]([5meC])[sP].[LR](A)[sP].[dR](A)[sP].[dR](A)[sP].[dR](G)[sP].[dR](T)[sP]. | | 54.8 | 62.1 |
| | | [dR](T)[sP].[dR](T)[sP].[LR](T)[sP].[dR](C)[sP].[dR](C)[sP].[LR]([5meC])[sP].[dR](A)[sP]. | | | |
| | | [LR](T)[sP].[LR](T)[sP].[LR](A) | | | |
| 1457 | 1457_6 | [LR](A)[sP].[LR]([5meC])[sP].[LR](A)[sP].[LR](A)[sP].[dR](A)[sP].[dR](G)[sP].[dR](T)[sP]. | | 57.8 | 60.2 |
| | | [dR](T)[sP].[dR](T)[sP].[dR](T)[sP].[dR](C)[sP].[LR]([5meC])[sP].[dR](C)[sP].[LR](A)[sP]. | | | |
| | | [dR](T)[sP].[LR](T)[sP].[LR](A) | | | |
| 1457 | 1457_7 | [LR](A)[sP].[LR]([5meC])[sP].[LR](A)[sP].[dR](A)[sP].[LR](A)[sP].[dR](G)[sP].[dR](T)[sP]. | | 63.1 | 58.9 |
| | | [LR](T)[sP].[dR](T)[sP].[dR](T)[sP].[dR](C)[sP].[dR](C)[sP].[dR](C)[sP].[dR](A)[sP]. | | | |
| | | [dR](T)[sP].[LR](T)[sP].[LR](A) | | | |
| 1458 | 1458_2 | [LR](T)[sP].[LR]([5meC])[sP].[dR](A)[sP].[LR](G)[sP].[dR](T)[sP].[dR](C)[sP]. | | 88.3 | 83.8 |
| | | [LR]([5meC])[sP].[dR](A)[sP].[dR](A)[sP].[dR](C)[sP].[dR](A)[sP].[dR](T)[sP].[dR](A)[sP]. | | | |
| | | [LR](A)[sP].[LR]([5meC])[sP].[LR](T)[sP].[LR]([5meC]) | | | |
| 1458 | 1458_3 | [LR](T)[sP].[LR]([5meC])[sP].[dR](A)[sP].[dR](G)[sP].[dR](T)[sP].[dR](C)[sP].[dR](C)[sP]. | | 72.6 | 73.3 |
| | | [dR](A)[sP].[dR](A)[sP].[LR]([5meC])[sP].[dR](A)[sP].[dR](T)[sP].[dR](A)[sP].[LR](A)[sP]. | | | |
| | | [LR]([5meC])[sP].[LR](T)[sP].[LR]([5meC]) | | | |
| 1458 | 1458_4 | [LR](T)[sP].[LR]([5meC])[sP].[dR](A)[sP].[LR](G)[sP].[dR](T)[sP].[dR](C)[sP].[dR](C)[sP]. | | 79.3 | 77 |
| | | [LR](A)[sP].[dR](A)[sP].[dR](C)[sP].[dR](A)[sP].[dR](T)[sP].[dR](A)[sP].[dR](A)[sP]. | | | |
| | | [LR]([5meC])[sP].[LR](T)[sP].[LR]([5meC]) | | | |
| 1458 | 1458_5 | [LR](T)[sP].[LR]([5meC])[sP].[dR](A)[sP].[dR](G)[sP].[LR](T)[sP].[LR]([5meC])[sP]. | | 55.6 | 68.4 |
| | | [dR](C)[sP].[LR](A)[sP].[dR](A)[sP].[dR](C)[sP].[dR](A)[sP].[dR](T)[sP].[dR](A)[sP]. | | | |
| | | [dR](A)[sP].[dR](C)[sP].[LR](T)[sP].[LR]([5meC]) | | | |
| 1458 | 1458_6 | [LR](T)[sP].[LR]([5meC])[sP].[dR](A)[sP].[LR](G)[sP].[dR](T)[sP].[dR](C)[sP].[dR](C)[sP]. | | 46.1 | 54.5 |
| | | [dR](A)[sP].[dR](A)[sP].[dR](C)[sP].[dR](A)[sP].[dR](T)[sP].[dR](A)[sP].[dR](A)[sP]. | | | |
| | | [LR]([5meC])[sP].[LR](T)[sP].[LR]([5meC]) | | | |
| 1460 | 1460_2 | [LR](A)[sP].[LR](T)[sP].[dR](C)[sP].[dR](A)[sP].[dR](G)[sP].[dR](T)[sP].[LR]([5meC])[sP]. | | 31.4 | 59.7 |
| | | [LR]([5meC])[sP].[dR](A)[sP].[dR](A)[sP].[dR](C)[sP].[dR](A)[sP].[dR](T)[sP].[dR](A)[sP]. | | | |
| | | [dR](A)[sP].[dR](C)[sP].[LR](T)[sP].[LR]([5meC]) | | | |
| 1460 | 1460_3 | [LR](A)[sP].[LR](T)[sP].[dR](C)[sP].[LR](A)[sP].[dR](G)[sP].[dR](T)[sP].[dR](C)[sP]. | | 61.6 | 66.8 |
| | | [LR]([5meC])[sP].[dR](A)[sP].[dR](A)[sP].[dR](C)[sP].[dR](A)[sP].[dR](T)[sP].[dR](A)[sP]. | | | |
| | | [LR](A)[sP].[dR](C)[sP].[LR](T)[sP].[LR]([5meC]) | | | |
| 1460 | 1460_4 | [LR](A)[sP].[LR](T)[sP].[dR](C)[sP].[LR](A)[sP].[dR](G)[sP].[LR](T)[sP].[LR]([5meC])[sP]. | | 85.3 | 86.3 |
| | | [dR](C)[sP].[dR](A)[sP].[dR](A)[sP].[dR](C)[sP].[dR](A)[sP].[dR](T)[sP].[LR](A)[sP]. | | | |
| | | [dR](A)[sP].[dR](C)[sP].[LR](T)[sP].[LR]([5meC]) | | | |
| 1460 | 1460_5 | [LR](A)[sP].[LR](T)[sP].[LR]([5meC])[sP].[LR](A)[sP].[dR](G)[sP].[dR](T)[sP].[dR](C)[sP]. | | 40.1 | 66.2 |
| | | [LR]([5meC])[sP].[dR](A)[sP].[dR](A)[sP].[dR](C)[sP].[dR](A)[sP].[dR](T)[sP].[dR](A)[sP]. | | | |
| | | [dR](A)[sP].[dR](C)[sP].[LR](T)[sP].[LR]([5meC]) | | | |
| 1460 | 1460_6 | [LR](A)[sP].[LR](T)[sP].[LR]([5meC])[sP].[dR](A)[sP].[dR](G)[sP].[dR](T)[sP].[dR](C)[sP]. | | 41 | 56.5 |
| | | [dR](C)[sP].[dR](A)[sP].[dR](A)[sP].[dR](C)[sP].[dR](A)[sP].[dR](T)[sP].[dR](A)[sP]. | | | |
| | | [dR](A)[sP].[LR]([5meC])[sP].[LR](T)[sP].[LR]([5meC]) | | | |
| 1460 | 1460_7 | [LR](A)[sP].[LR](T)[sP].[LR]([5meC])[sP].[dR](A)[sP].[LR](G)[sP].[dR](T)[sP].[dR](C)[sP]. | | 62.1 | 65.3 |
| | | [dR](C)[sP].[dR](A)[sP].[dR](A)[sP].[dR](C)[sP].[LR](A)[sP].[dR](T)[sP].[dR](A)[sP]. | | | |
| | | [dR](A)[sP].[LR]([5meC])[sP].[LR](T)[sP].[LR]([5meC]) | | | |
| 1461 | 1461_2 | [LR](A)[sP].[LR](T)[sP].[LR]([5meC])[sP].[dR](A)[sP].[dR](G)[sP].[dR](T)[sP].[dR](C)[sP]. | | 95.6 | 90.2 |
| | | [dR](C)[sP].[dR](A)[sP].[LR](A)[sP].[LR]([5meC])[sP].[dR](A)[sP].[dR](T)[sP].[dR](A)[sP]. | | | |
| | | [LR](A)[sP].[LR]([5meC])[sP].[LR](T) | | | |
| 1461 | 1461_3 | [LR](A)[sP].[LR](T)[sP].[LR]([5meC])[sP].[dR](A)[sP].[dR](G)[sP].[dR](T)[sP].[dR](C)[sP]. | | 78.4 | 74.3 |
| | | [dR](C)[sP].[dR](A)[sP].[dR](A)[sP].[LR]([5meC])[sP].[LR](A)[sP].[dR](T)[sP].[dR](A)[sP]. | | | |
| | | [LR](A)[sP].[LR]([5meC])[sP].[LR](T) | | | |
| 1461 | 1461_4 | [LR](A)[sP].[LR](T)[sP].[dR](C)[sP].[LR](A)[sP].[dR](G)[sP].[LR](T)[sP].[LR]([5meC])[sP]. | | 75.3 | 79 |
| | | [dR](C)[sP].[dR](A)[sP].[dR](A)[sP].[dR](C)[sP].[dR](A)[sP].[dR](T)[sP].[dR](A)[sP]. | | | |
| | | [dR](A)[sP].[LR]([5meC])[sP].[LR](T) | | | |
| 1485 | 1485_3 | [LR](T)[sP].[LR]([5meC])[sP].[dR](A)[sP].[dR](C)[sP].[LR](A)[sP].[dR](G)[sP].[dR](C)[sP]. | | 85.8 | 89.4 |
| | | [dR](C)[sP].[dR](T)[sP].[dR](A)[sP].[dR](T)[sP].[dR](C)[sP].[LR](A)[sP].[dR](C)[sP]. | | | |
| | | [dR](C)[sP].[LR](A)[sP].[LR]([5meC]) | | | |
| 1485 | 1485_4 | [LR](T)[sP].[LR]([5meC])[sP].[dR](A)[sP].[dR](C)[sP].[dR](A)[sP].[dR](G)[sP].[dR](C)[sP]. | | 71.3 | 77 |
| | | [dR](C)[sP].[dR](T)[sP].[dR](A)[sP].[dR](T)[sP].[dR](C)[sP].[LR](A)[sP].[LR]([5meC])[sP]. | | | |
| | | [dR](C)[sP].[LR](A)[sP].[LR]([5meC]) | | | |
| 1486 | 1486_3 | [LR](A)[sP].[LR](T)[sP].[dR](C)[sP].[dR](A)[sP].[dR](C)[sP].[dR](A)[sP].[dR](G)[sP]. | | 92.2 | 92.9 |
| | | [dR](C)[sP].[LR]([5meC])[sP].[dR](T)[sP].[dR](A)[sP].[dR](T)[sP].[dR](C)[sP].[dR](A)[sP]. | | | |
| | | [dR](C)[sP].[LR]([5meC])[sP].[LR](A) | | | |
| 1486 | 1486_4 | [LR](A)[sP].[LR](T)[sP].[dR](C)[sP].[dR](A)[sP].[dR](C)[sP].[dR](A)[sP].[dR](G)[sP]. | | 87.2 | 86.3 |
| | | [LR]([5meC])[sP].[dR](C)[sP].[dR](T)[sP].[dR](A)[sP].[dR](T)[sP].[dR](C)[sP].[dR](A)[sP]. | | | |
| | | [dR](C)[sP].[LR]([5meC])[sP].[LR](A) | | | |
| 1486 | 1486_5 | [LR](A)[sP].[LR](T)[sP].[dR](C)[sP].[dR](A)[sP].[dR](C)[sP].[LR](A)[sP].[dR](G)[sP]. | | 76.3 | 77.5 |
| | | [dR](C)[sP].[dR](C)[sP].[dR](T)[sP].[dR](A)[sP].[dR](T)[sP].[dR](C)[sP].[LR](A)[sP]. | | | |
| | | dR](C)[sP].[LR]([5meC])[sP].[LR](A) | | | |
| 1486 | 1486_6 | [LR](A)[sP].[LR](T)[sP].[dR](C)[sP].[dR](A)[sP].[dR](C)[sP].[dR](A)[sP].[dR](G)[sP]. | | 80.1 | 84.5 |
| | | [dR](C)[sP].[dR](C)[sP].[dR](T)[sP].[dR](A)[sP].[dR](T)[sP].[LR]([5meC])[sP].[dR](A)[sP]. | | | |
| | | [dR](C)[sP].[LR]([5meC])[sP].[LR](A) | | | |
| 1486 | 1486_7 | [LR](A)[sP].[LR](T)[sP].[dR](C)[sP].[LR](A)[sP].[dR](C)[sP].[LR](A)[sP].[dR](G)[sP]. | | 52.7 | 72 |
| | | [dR](C)[sP].[dR](C)[sP].[dR](T)[sP].[dR](A)[sP].[dR](T)[sP].[dR](C)[sP].[dR](A)[sP]. | | | |
| | | [dR](C)[sP].[LR]([5meC])[sP].[LR](A) | | | |
| 1486 | 1486_8 | [LR](A)[sP].[LR](T)[sP].[dR](C)[sP].[LR](A)[sP].[dR](C)[sP].[dR](A)[sP].[dR](G)[sP]. | | 81.6 | 85.8 |
| | | [LR]([5meC])[sP].[dR](C)[sP].[dR](T)[sP].[dR](A)[sP].[dR](T)[sP].[dR](C)[sP].[dR](A)[sP]. | | | |
| | | [dR](C)[sP].[LR]([5meC])[sP].[LR](A) | | | |
| 1487 | 1487_3 | [LR](A)[sP].[LR](A)[sP].[dR](T)[sP].[dR](C)[sP].[LR](A)[sP].[LR]([5meC])[sP].[dR](A)[sP]. | | 83.8 | 86.6 |
| | | [dR](G)[sP].[dR](C)[sP].[dR](C)[sP].[dR](T)[sP].[dR](A)[sP].[dR](T)[sP].[dR](C)[sP]. | | | |
| | | [LR](A)[sP].[LR]([5meC])[sP].[LR]([5meC]) | | | |
| 1487 | 1487_4 | [LR](A)[sP].[LR](A)[sP].[dR](T)[sP].[LR]([5meC])[sP].[dR](A)[sP].[dR](C)[sP].[dR](A)[sP]. | | 55.1 | 71.1 |
| | | [dR](G)[sP].[dR](C)[sP].[dR](C)[sP].[dR](T)[sP].[dR](A)[sP].[dR](T)[sP].[LR]([5meC])[sP]. | | | |
| | | [dR](A)[sP].[LR]([5meC])[sP].[LR]([5meC]) | | | |
| 1487 | 1487_5 | [LR](A)[sP].[LR](A)[sP].[dR](T)[sP].[dR](C)[sP].[LR](A)[sP].[dR](C)[sP].[dR](A)[sP]. | | 92.3 | 83.8 |
| | | [LR](G)[sP].[dR](C)[sP].[dR](C)[sP].[dR](T)[sP].[dR](A)[sP].[dR](T)[sP].[dR](C)[sP]. | | | |
| | | [dR](A)[sP].[LR]([5meC])[sP].[LR]([5meC]) | | | |
| 1487 | 1487_6 | [LR](A)[sP].[LR](A)[sP].[dR](T)[sP].[dR](C)[sP].[dR](A)[sP].[dR](C)[sP].[dR](A)[sP]. | | 96.1 | 79.4 |
| | | LR](G)[sP].[dR](C)[sP].[dR](C)[sP].[dR](T)[sP].[dR](A)[sP].[dR](T)[sP].[dR](C)[sP]. | | | |
| | | [dR](A)[sP].[LR]([5meC])[sP].[LR]([5meC]) | | | |
| 1487 | 1487_7 | [LR](A)[sP].[LR](A)[sP].[dR](T)[sP].[dR](C)[sP].[dR](A)[sP].[dR](C)[sP].[LR](A)[sP]. | | 91.4 | 90.2 |
| | | [dR](G)[sP].[LR]([5meC])[sP].[dR](C)[sP].[dR](T)[sP].[dR](A)[sP].[dR](T)[sP].[dR](C)[sP]. | | | |
| | | [dR](A)[sP].[LR]([5meC])[sP].[LR]([5meC]) | | | |
| 1487 | 1487_8 | [LR](A)[sP].[LR](A)[sP].[dR](T)[sP].[dR](C)[sP].[dR](A)[sP].[dR](C)[sP].[dR](A)[sP]. | | 92.8 | 89.1 |
| | | [dR](G)[sP].[dR](C)[sP].[dR](C)[sP].[LR](T)[sP].[dR](A)[sP].[dR](T)[sP].[LR]([5meC])[sP]. | | | |
| | | [dR](A)[sP].[LR]([5meC])[sP].[LR]([5meC]) | | | |
| 1487 | 1487_9 | [LR](A)[sP].[LR](A)[sP].[dR](T)[sP].[dR](C)[sP].[LR](A)[sP].[dR](C)[sP].[LR](A)[sP]. | | 100 | 93.6 |
| | | [dR](G)[sP].[LR]([5meC])[sP].[dR](C)[sP].[dR](T)[sP].[dR](A)[sP].[dR](T)[sP].[dR](C)[sP]. | | | |
| | | [dR](A)[sP].[LR]([5meC])[sP].[LR]([5meC]) | | | |
| 1487 | 1487_10 | [LR](A)[sP].[LR](A)[sP].[dR](T)[sP].[dR](C)[sP].[dR](A)[sP].[dR](C)[sP].[dR](A)[sP]. | | 99.9 | 93.6 |
| | | [dR](G)[sP].[LR]([5meC])[sP].[dR](C)[sP].[dR](T)[sP].[dR](A)[sP].[dR](T)[sP].[dR](C)[sP]. | | | |
| | | [dR](A)[sP].[LR]([5meC])[sP].[LR]([5meC]) | | | |
| 1487 | 1487_11 | [LR](A)[sP].[LR](A)[sP].[dR](T)[sP].[dR](C)[sP].[dR](A)[sP].[dR](C)[sP].[dR](A)[sP]. | | 99.7 | 97.4 |
| | | [dR](G)[sP].[dR](C)[sP].[LR]([5meC])[sP].[dR](T)[sP].[dR](A)[sP].[dR](T)[sP].[dR](C)[sP]. | | | |
| | | [dR](A)[sP].[LR]([5meC])[sP].[LR]([5meC]) | | | |
| 1487 | 1487_12 | [LR](A)[sP].[LR](A)[sP].[dR](T)[sP].[dR](C)[sP].[dR](A)[sP].[LR]([5meC])[sP].[dR](A)[sP]. | | 95.2 | 92.5 |
| | | [dR](G)[sP].[dR](C)[sP].[dR](C)[sP].[dR](T)[sP].[dR](A)[sP].[dR](T)[sP].[dR](C)[sP]. | | | |
| | | [dR](A)[sP].[LR]([5meC])[sP].[LR]([5meC]) | | | |
| 1487 | 1487_13 | [LR](A)[sP].[LR](A)[sP].[dR](T)[sP].[dR](C)[sP].[dR](A)[sP].[dR](C)[sP].[dR](A)[sP]. | | 94.5 | 98.4 |
| | | [dR](G)[sP].[dR](C)[sP].[LR]([5meC])[sP].[dR](T)[sP].[dR](A)[sP].[LR](T)[sP].[dR](C)[sP]. | | | |
| | | [dR](A)[sP].[LR]([5meC])[sP].[LR]([5meC]) | | | |
| 1489 | 1489_2 | [LR](G)[sP].[LR]([5meC])[sP].[dR](G)[sP].[dR](T)[sP].[dR](C)[sP].[dR](A)[sP].[dR](C)[sP]. | | 50.5 | 44.3 |
| | | [dR](C)[sP].[LR]([5meC])[sP].[dR](A)[sP].[dR](A)[sP].[dR](A)[sP].[dR](T)[sP].[dR](C)[sP]. | | | |
| | | [LR](A)[sP].[LR]([5meC]) | | | |
| 1489 | 1489_3 | [LR](G)[sP].[LR]([5meC])[sP].[LR](G)[sP].[dR](T)[sP].[dR](C)[sP].[dR](A)[sP].[dR](C)[sP]. | | 70.6 | 71.1 |
| | | [LR]([5meC])[sP].[dR](C)[sP].[dR](A)[sP].[dR](A)[sP].[dR](A)[sP].[dR](T)[sP].[dR](C)[sP]. | | | |
| | | [LR](A)[sP].[LR]([5meC]) | | | |
| 1490 | 1490_2 | [LR](A)[sP].[LR](G)[sP].[dR]([5meC])[sP].[dR](G)[sP].[dR](T)[sP].[dR](C)[sP].[LR](A)[sP]. | | 62.9 | 71.2 |
| | | [LR]([5meC])[sP].[dR](C)[sP].[dR](C)[sP].[dR](A)[sP].[dR](A)[sP].[dR](A)[sP].[dR](T)[sP]. | | | |
| | | [LR]([5meC])[sP].[LR](A) | | | |
| 1490 | 1490_3 | [LR](A)[sP].[LR](G)[sP].[dR]([5meC])[sP].[dR](G)[sP].[dR](T)[sP].[dR](C)[sP].[dR](A)[sP]. | | 66.9 | 64.9 |
| | | [dR](C)[sP].[LR]([5meC])[sP].[dR](C)[sP].[dR](A)[sP].[LR](A)[sP].[dR](A)[sP].[dR](T)[sP]. | | | |
| | | [LR]([5meC])[sP].[LR](A) | | | |
| 1490 | 1490_4 | [LR](A)[sP].[LR](G)[sP].[dR]([5meC])[sP].[dR](G)[sP].[dR](T)[sP].[dR](C)[sP].[dR](A)[sP]. | | 59.6 | 64.2 |
| | | [dR](C)[sP].[dR](C)[sP].[dR](C)[sP].[dR](A)[sP].[LR](A)[sP].[LR](A)[sP].[dR](T)[sP]. | | | |
| | | [LR]([5meC])[sP].[LR](A) | | | |
| 1490 | 1490_5 | [LR](A)[sP].[LR](G)[sP].[dR]([5meC])[sP].[dR](G)[sP].[dR](T)[sP].[dR](C)[sP].[LR](A)[sP]. | | 52.3 | 68.1 |
| | | [dR](C)[sP].[dR](C)[sP].[dR](C)[sP].[dR](A)[sP].[dR](A)[sP].[dR](A)[sP].[dR](T)[sP]. | | | |
| | | [LR]([5meC])[sP].[LR](A) | | | |
| 1490 | 1490_6 | [LR](A)[sP].[LR](G)[sP].[dR]([5meC])[sP].[dR](G)[sP].[dR](T)[sP].[dR](C)[sP].[dR](A)[sP]. | | 55.9 | 55.4 |
| | | [dR](C)[sP].[dR](C)[sP].[LR]([5meC])[sP].[dR](A)[sP].[dR](A)[sP].[dR](A)[sP].[LR](T)[sP]. | | | |
| | | [LR]([5meC])[sP].[LR](A) | | | |
| 1491 | 1491_2 | [LR](A)[sP].[LR](G)[sP].[dR]([5meC])[sP].[dR](G)[sP].[dR](T)[sP].[dR](C)[sP].[dR](A)[sP]. | | 76.8 | 70.7 |
| | | [dR](C)[sP].[LR]([5meC])[sP].[dR](C)[sP].[LR](A)[sP].[dR](A)[sP].[LR](A)[sP].[LR](T)[sP]. | | | |
| | | [LR]([5meC]) | | | |
| 1491 | 1491_3 | [LR](A)[sP].[LR](G)[sP].[dR]([5meC])[sP].[dR](G)[sP].[dR](T)[sP].[dR](C)[sP].[dR](A)[sP]. | | 67.8 | 66 |
| | | [dR](C)[sP].[LR]([5meC])[sP].[dR](C)[sP].[dR](A)[sP].[dR](A)[sP].[LR](A)[sP].[LR](T)[sP]. | | | |
| | | [LR]([5meC]) | | | |
| 1602 | 1602_2 | [LR](T)[sP].[LR](T)[sP].[LR]([5meC])[sP].[dR](T)[sP].[dR](T)[sP].[dR](C)[sP].[dR](A)[sP]. | | 61.6 | 57.2 |
| | | [dR](T)[sP].[dR](T)[sP].[LR](A)[sP].[dR](T)[sP].[dR](A)[sP].[LR]([5meC])[sP].[dR](C)[sP]. | | | |
| | | [LR](A)[sP].[dR](T)[sP].[dR](C)[sP].[dR](A)[sP].[dR](A)[sP].[LR](A)[sP].[LR](T) | | | |
| 1602 | 1602_3 | [LR](T)[sP].[LR](T)[sP].[dR](C)[sP].[LR](T)[sP].[dR](T)[sP].[LR]([5meC])[sP].[LR](A)[sP]. | | 74.9 | 67 |
| | | [dR](T)[sP].[dR](T)[sP].[dR](A)[sP].[LR](T)[sP].[dR](A)[sP].[dR](C)[sP].[dR](C)[sP]. | | | |
| | | [dR](A)[sP].[dR](T)[sP].[dR](C)[sP].[dR](A)[sP].[dR](A)[sP].[LR](A)[sP].[LR](T) | | | |
| 1602 | 1602_4 | [LR](T)[sP].[LR](T)[sP].[dR](C)[sP].[LR](T)[sP].[dR](T)[sP].[dR](C)[sP].[LR](A)[sP]. | | 67.3 | 66.4 |
| | | [LR](T)[sP].[dR](T)[sP].[dR](A)[sP].[dR](T)[sP].[dR](A)[sP].[dR](C)[sP].[dR](C)[sP]. | | | |
| | | [dR](A)[sP].[LR](T)[sP].[dR](C)[sP].[dR](A)[sP].[dR](A)[sP].[LR](A)[sP].[LR](T) | | | |
| 1602 | 1602_5 | [LR](T)[sP].[LR](T)[sP].[LR]([5meC])[sP].[LR](T)[sP].[dR](T)[sP].[dR](C)[sP].[dR](A)[sP]. | | 56.3 | 58.5 |
| | | [dR](T)[sP].[LR](T)[sP].[dR](A)[sP].[dR](T)[sP].[dR](A)[sP].[dR](C)[sP].[dR](C)[sP]. | | | |
| | | [dR](A)[sP].[dR](T)[sP].[dR](C)[sP].[LR](A)[sP].[LR](A)[sP].[LR](A)[sP].[LR](T) | | | |
| 1602 | 1602_6 | [LR](T)[sP].[LR](T)[sP].[LR]([5meC])[sP].[LR](T)[sP].[dR](T)[sP].[dR](C)[sP].[dR](A)[sP]. | | 57.7 | 61.1 |
| | | [dR](T)[sP].[dR](T)[sP].[dR](A)[sP].[dR](T)[sP].[LR](A)[sP].[dR](C)[sP].[dR](C)[sP]. | | | |
| | | [LR](A)[sP].[dR](T)[sP].[dR](C)[sP].[dR](A)[sP].[LR](A)[sP].[LR](A)[sP].[LR](T) | | | |
| 1603 | 1603_2 | [LR](T)[sP].[LR](T)[sP].[dR](T)[sP].[LR]([5meC])[sP].[dR](T)[sP].[dR](T)[sP].[dR](C)[sP]. | | 78.8 | 69.7 |
| | | [dR](A)[sP].[dR](T)[sP].[dR](T)[sP].[LR](A)[sP].[LR](T)[sP].[LR](A)[sP].[dR](C)[sP]. | | | |
| | | [dR](C)[sP].[dR](A)[sP].[LR](T)[sP].[dR](C)[sP].[dR](A)[sP].[LR](A)[sP].[LR](A) | | | |
| 1603 | 1603_3 | [LR](T)[sP].[LR](T)[sP].[dR](T)[sP].[dR](C)[sP].[LR](T)[sP].[dR](T)[sP].[LR]([5meC])[sP]. | | 66.8 | 67.5 |
| | | [dR](A)[sP].[LR](T)[sP].[LR](T)[sP].[dR](A)[sP].[dR](T)[sP].[dR](A)[sP].[dR](C)[sP]. | | | |
| | | [dR](C)[sP].[dR](A)[sP].[LR](T)[sP].[dR](C)[sP].[dR](A)[sP].[LR](A)[sP].[LR](A) | | | |
| 1603 | 1603_4 | [LR](T)[sP].[LR](T)[sP].[dR](T)[sP].[dR](C)[sP].[LR](T)[sP].[LR](T)[sP].[dR](C)[sP]. | | 60.7 | 54.9 |
| | | [LR](A)[sP].[LR](T)[sP].[dR](T)[sP].[dR](A)[sP].[dR](T)[sP].[dR](A)[sP].[dR](C)[sP]. | | | |
| | | [dR](C)[sP].[LR](A)[sP].[LR](T)[sP].[dR](C)[sP].[dR](A)[sP].[LR](A)[sP].[LR](A) | | | |
| 1604 | 1604_2 | [LR](T)[sP].[LR](T)[sP].[dR](T)[sP].[dR](T)[sP].[dR](C)[sP].[dR](T)[sP].[dR](T)[sP]. | | 27.1 | 36 |
| | | [dR](C)[sP].[LR](A)[sP].[dR](T)[sP].[dR](T)[sP].[dR](A)[sP].[dR](T)[sP].[dR](A)[sP]. | | | |
| | | [dR](C)[sP].[LR]([5meC])[sP].[dR](A)[sP].[LR](T)[sP].[LR]([5meC])[sP].[LR](A)[sP].[LR](A) | | | |
| 1604 | 1604_3 | [LR](T)[sP].[LR](T)[sP].[dR](T)[sP].[dR](T)[sP].[dR](C)[sP].[dR](T)[sP].[dR](T)[sP]. | 15.7 | 17.7 | 22 |
| | | [LR]([5meC])[sP].[LR](A)[sP].[dR](T)[sP].[dR](T)[sP].[dR](A)[sP].[dR](T)[sP].[dR](A)[sP]. | | | |
| | | [dR](C)[sP].[LR]([5meC])[sP].[dR](A)[sP].[LR](T)[sP].[dR](C)[sP].[LR](A)[sP].[LR](A) | | | |
| 1604 | 1604_4 | [LR](T)[sP].[LR](T)[sP].[dR](T)[sP].[dR](T)[sP].[dR](C)[sP].[dR](T)[sP].[dR](T)[sP]. | 24.9 | 27.6 | 25.5 |
| | | [dR](C)[sP].[LR](A)[sP].[dR](T)[sP].[LR](T)[sP].[dR](A)[sP].[dR](T)[sP].[dR](A)[sP]. | | | |
| | | [dR](C)[sP].[dR](C)[sP].[dR](A)[sP].[LR](T)[sP].[LR]([5meC])[sP].[LR](A)[sP].[LR](A) | | | |
| 1604 | 1604_5 | [LR](T)[sP].[LR](T)[sP].[dR](T)[sP].[dR](T)[sP].[dR](C)[sP].[dR](T)[sP].[dR](T)[sP]. | | 29 | 29.7 |
| | | [dR](C)[sP].[LR](A)[sP].[dR](T)[sP].[dR](T)[sP].[LR](A)[sP].[dR](T)[sP].[dR](A)[sP]. | | | |
| | | [dR](C)[sP].[dR](C)[sP].[dR](A)[sP].[LR](T)[sP].[LR]([5meC])[sP].[LR](A)[sP].[LR](A) | | | |
| 1604 | 1604_6 | [LR](T)[sP].[LR](T)[sP].[dR](T)[sP].[dR](T)[sP].[dR](C)[sP].[dR](T)[sP].[dR](T)[sP]. | | 33.4 | 36.8 |
| | | [LR]([5meC])[sP].[dR](A)[sP].[dR](T)[sP].[dR](T)[sP].[LR](A)[sP].[dR](T)[sP].[dR](A)[sP]. | | | |
| | | [dR](C)[sP].[dR](C)[sP].[dR](A)[sP].[dR](T)[sP].[LR]([5meC])[sP].[LR](A)[sP].[LR](A) | | | |
| 1604 | 1604_7 | [LR](T)[sP].[LR](T)[sP].[dR](T)[sP].[dR](T)[sP].[dR](C)[sP].[dR](T)[sP].[dR](T)[sP]. | | 61.2 | 53.7 |
| | | [LR]([5meC])[sP].[dR](A)[sP].[dR](T)[sP].[dR](T)[sP].[dR](A)[sP].[LR](T)[sP].[dR](A)[sP]. | | | |
| | | [dR](C)[sP].[dR](C)[sP].[dR](A)[sP].[dR](T)[sP].[dR](C)[sP].[LR](A)[sP].[LR](A) | | | |
| 1604 | 1604_8 | [LR](T)[sP].[LR](T)[sP].[dR](T)[sP].[dR](T)[sP].[dR](C)[sP].[LR](T)[sP].[dR](T)[sP]. | | 31.9 | 40.9 |
| | | [dR](C)[sP].[dR](A)[sP].[dR](T)[sP].[dR](T)[sP].[dR](A)[sP].[dR](T)[sP].[dR](A)[sP]. | | | |
| | | [dR](C)[sP].[LR]([5meC])[sP].[LR](A)[sP].[LR](T)[sP].[dR](C)[sP].[LR](A)[sP].[LR](A) | | | |
| 1604 | 1604_9 | [LR](T)[sP].[LR](T)[sP].[LR](T)[sP].[LR](T)[sP].[dR](C)[sP].[LR](T)[sP].[dR](T)[sP]. | | 62.3 | 65.8 |
| | | [dR](C)[sP].[dR](A)[sP].[dR](T)[sP].[dR](T)[sP].[dR](A)[sP].[dR](T)[sP].[dR](A)[sP]. | | | |
| | | [LR]([5meC])[sP].[dR](C)[sP].[LR](A)[sP].[LR](T)[sP].[dR](C)[sP].[LR](A)[sP].[LR](A) | | | |
| 1604 | 1604_10 | [LR](T)[sP].[LR](T)[sP].[dR](T)[sP].[dR](T)[sP].[dR](C)[sP].[LR](T)[sP].[LR](T)[sP]. | | 38.7 | 36.3 |
| | | [dR](C)[sP].[LR](A)[sP].[LR](T)[sP].[dR](T)[sP].[dR](A)[sP].[dR](T)[sP].[dR](A)[sP]. | | | |
| | | [dR](C)[sP].[dR](C)[sP].[dR](A)[sP].[dR](T)[sP].[dR](C)[sP].[LR](A)[sP].[LR](A) | | | |
| 1604 | 1604_11 | [LR](T)[sP].[LR](T)[sP].[dR](T)[sP].[dR](T)[sP].[dR](C)[sP].[dR](T)[sP].[dR](T)[sP]. | 58.8 | | 41.9 |
| | | [dR](C)[sP].[LR](A)[sP].[dR](T)[sP].[dR](T)[sP].[dR](A)[sP].[dR](T)[sP].[dR](A)[sP]. | | | |
| | | [dR](C)[sP].[dR](C)[sP].[LR](A)[sP].[dR](T)[sP].[dR](C)[sP].[LR](A)[sP].[LR](A) | | | |
| 1604 | 1604_12 | [LR](T)[sP].[LR](T)[sP].[dR](T)[sP].[dR](T)[sP].[dR](C)[sP].[dR](T)[sP].[dR](T)[sP]. | 57.3 | | 43.5 |
| | | [dR](C)[sP].[LR](A)[sP].[dR](T)[sP].[dR](T)[sP].[LR](A)[sP].[dR](T)[sP].[dR](A)[sP]. | | | |
| | | [dR](C)[sP].[dR](C)[sP].[dR](A)[sP].[dR](T)[sP].[dR](C)[sP].[LR](A)[sP].[LR](A) | | | |
| 1604 | 1604_13 | [LR](T)[sP].[LR](T)[sP].[dR](T)[sP].[dR](T)[sP].[dR](C)[sP].[dR](T)[sP].[dR](T)[sP]. | 53.2 | | 36.8 |
| | | [dR](C)[sP].[LR](A)[sP].[dR](T)[sP].[dR](T)[sP].[LR](A)[sP].[dR](T)[sP].[dR](A)[sP]. | | | |
| | | [dR](C)[sP].[dR](C)[sP].[LR](A)[sP].[dR](T)[sP].[dR](C)[sP].[LR](A)[sP].[LR](A) | | | |
| 1604 | 1604_14 | [LR](T)[sP].[LR](T)[sP].[dR](T)[sP].[dR](T)[sP].[dR](C)[sP].[dR](T)[sP].[dR](T)[sP]. | 40 | | 30.5 |
| | | [dR](C)[sP].[LR](A)[sP].[dR](T)[sP].[dR](T)[sP].[dR](A)[sP].[dR](T)[sP].[LR](A)[sP]. | | | |
| | | [dR](C)[sP].[dR](C)[sP].[LR](A)[sP].[dR](T)[sP].[dR](C)[sP].[LR](A)[sP].[LR](A) | | | |
| 1604 | 1604_15 | [LR](T)[sP].[LR](T)[sP].[dR](T)[sP].[dR](T)[sP].[dR](C)[sP].[dR](T)[sP].[dR](T)[sP]. | 48 | | 30.7 |
| | | [dR](C)[sP].[LR](A)[sP].[dR](T)[sP].[dR](T)[sP].[LR](A)[sP].[dR](T)[sP].[LR](A)[sP]. | | | |
| | | [dR](C)[sP].[dR](C)[sP].[dR](A)[sP].[dR](T)[sP].[dR](C)[sP].[LR](A)[sP].[LR](A) | | | |
| 1604 | 1604_16 | [LR](T)[sP].[LR](T)[sP].[dR](T)[sP].[LR](T)[sP].[dR](C)[sP].[dR](T)[sP].[dR](T)[sP]. | 41.1 | | 26.5 |
| | | [dR](C)[sP].[LR](A)[sP].[dR](T)[sP].[dR](T)[sP].[LR](A)[sP].[dR](T)[sP].[dR](A)[sP]. | | | |
| | | [dR](C)[sP].[dR](C)[sP].[dR](A)[sP].[dR](T)[sP].[dR](C)[sP].[LR](A)[sP].[LR](A) | | | |
| 1604 | 1604_17 | [LR](T)[sP].[LR](T)[sP].[dR](T)[sP].[dR](T)[sP].[dR](C)[sP].[dR](T)[sP].[LR](T)[sP]. | 42 | | 29.7 |
| | | [dR](C)[sP].[LR](A)[sP].[dR](T)[sP].[dR](T)[sP].[LR](A)[sP].[dR](T)[sP].[dR](A)[sP]. | | | |
| | | [dR](C)[sP].[dR](C)[sP].[dR](A)[sP].[dR](T)[sP].[dR](C)[sP].[LR](A)[sP].[LR](A) | | | |
| 1604 | 1604_18 | [LR](T)[sP].[LR](T)[sP].[dR](T)[sP].[dR](T)[sP].[dR](C)[sP].[dR](T)[sP].[dR](T)[sP]. | 71.7 | | 52.8 |
| | | [dR](C)[sP].[dR](A)[sP].[LR](T)[sP].[dR](T)[sP].[LR](A)[sP].[dR](T)[sP].[dR](A)[sP]. | | | |
| | | [dR](C)[sP].[dR](C)[sP].[dR](A)[sP].[dR](T)[sP].[dR](C)[sP].[LR](A)[sP].[LR](A) | | | |
| 1604 | 1604_19 | [LR](T)[sP].[LR](T)[sP].[dR](T)[sP].[LR](T)[sP].[dR](C)[sP].[dR](T)[sP].[dR](T)[sP]. | 29.1 | | 22.8 |
| | | [dR](C)[sP].[LR](A)[sP].[dR](T)[sP].[dR](T)[sP].[dR](A)[sP].[dR](T)[sP].[dR](A)[sP]. | | | |
| | | [dR](C)[sP].[dR](C)[sP].[LR](A)[sP].[dR](T)[sP].[dR](C)[sP].[LR](A)[sP].[LR](A) | | | |
| 1604 | 1604_20 | [LR](T)[sP].[LR](T)[sP].[dR](T)[sP].[dR](T)[sP].[dR](C)[sP].[dR](T)[sP].[LR](T)[sP]. | 32.7 | | 24.5 |
| | | [dR](C)[sP].[LR](A)[sP].[dR](T)[sP].[dR](T)[sP].[dR](A)[sP].[dR](T)[sP].[dR](A)[sP]. | | | |
| | | [dR](C)[sP].[dR](C)[sP].[LR](A)[sP].[dR](T)[sP].[dR](C)[sP].[LR](A)[sP].[LR](A) | | | |
| 1604 | 1604_21 | [LR](T)[sP].[LR](T)[sP].[dR](T)[sP].[dR](T)[sP].[dR](C)[sP].[dR](T)[sP].[dR](T)[sP]. | 63.5 | | 49.2 |
| | | [dR](C)[sP].[dR](A)[sP].[LR](T)[sP].[dR](T)[sP].[dR](A)[sP].[dR](T)[sP].[dR](A)[sP]. | | | |
| | | [dR](C)[sP].[dR](C)[sP].[LR](A)[sP].[dR](T)[sP].[dR](C)[sP].[LR](A)[sP].[LR](A) | | | |
| 1604 | 1604_22 | [LR](T)[sP].[LR](T)[sP].[dR](T)[sP].[dR](T)[sP].[dR](C)[sP].[dR](T)[sP].[dR](T)[sP]. | 72.5 | | 62.4 |
| | | [dR](C)[sP].[dR](A)[sP].[dR](T)[sP].[dR](T)[sP].[dR](A)[sP].[dR](T)[sP].[dR](A)[sP]. | | | |
| | | [dR](C)[sP].[dR](C)[sP].[dR](A)[sP].[LR](T)[sP].[dR](C)[sP].[LR](A)[sP].[LR](A) | | | |
| 1604 | 1604_23 | [LR](T)[sP].[LR](T)[sP].[dR](T)[sP].[dR](T)[sP].[dR](C)[sP].[dR](T)[sP].[dR](T)[sP]. | 63.7 | | 49 |
| | | [dR](C)[sP].[dR](A)[sP].[dR](T)[sP].[dR](T)[sP].[dR](A)[sP].[dR](T)[sP].[dR](A)[sP]. | | | |
| | | [dR](C)[sP].[LR]([5meC])[sP].[dR](A)[sP].[dR](T)[sP].[dR](C)[sP].[LR](A)[sP].[LR](A) | | | |
| 1604 | 1604_24 | [LR](T)[sP].[LR](T)[sP].[dR](T)[sP].[dR](T)[sP].[dR](C)[sP].[dR](T)[sP].[dR](T)[sP]. | 46.4 | | 34.7 |
| | | [dR](C)[sP].[LR](A)[sP].[dR](T)[sP].[dR](T)[sP].[dR](A)[sP].[dR](T)[sP].[dR](A)[sP]. | | | |
| | | [dR](C)[sP].[LR]([5meC])[sP].[dR](A)[sP].[dR](T)[sP].[dR](C)[sP].[LR](A)[sP].[LR](A) | | | |
| 1604 | 1604_25 | [LR](T)[sP].[LR](T)[sP].[dR](T)[sP].[dR](T)[sP].[dR](C)[sP].[LR](T)[sP].[dR](T)[sP]. | 42.5 | | 29.8 |
| | | [dR](C)[sP].[LR](A)[sP].[dR](T)[sP].[dR](T)[sP].[dR](A)[sP].[dR](T)[sP].[dR](A)[sP]. | | | |
| | | [dR](C)[sP].[dR](C)[sP].[LR](A)[sP].[dR](T)[sP].[dR](C)[sP].[LR](A)[sP].[LR](A) | | | |
| 1604 | 1604_26 | [LR](T)[sP].[LR](T)[sP].[dR](T)[sP].[dR](T)[sP].[dR](C)[sP].[dR](T)[sP].[dR](T)[sP]. | 47.3 | | 36.6 |
| | | [dR](C)[sP].[LR](A)[sP].[dR](T)[sP].[dR](T)[sP].[dR](A)[sP].[dR](T)[sP].[dR](A)[sP]. | | | |
| | | [dR](C)[sP].[dR](C)[sP].[dR](A)[sP].[LR](T)[sP].[dR](C)[sP].[LR](A)[sP].[LR](A) | | | |
| 1604 | 1604_27 | [LR](T)[sP].[LR](T)[sP].[dR](T)[sP].[dR](T)[sP].[dR](C)[sP].[dR](T)[sP].[dR](T)[sP]. | 58.5 | | 48.2 |
| | | [dR](C)[sP].[dR](A)[sP].[dR](T)[sP].[dR](T)[sP].[LR](A)[sP].[dR](T)[sP].[dR](A)[sP]. | | | |
| | | [dR](C)[sP].[dR](C)[sP].[dR](A)[sP].[LR](T)[sP].[dR](C)[sP].[LR](A)[sP].[LR](A) | | | |
| 1604 | 1604_28 | [LR](T)[sP].[LR](T)[sP].[dR](T)[sP].[dR](T)[sP].[dR](C)[sP].[dR](T)[sP].[dR](T)[sP]. | 53.8 | | 39.6 |
| | | [LR]([5meC])[sP].[dR](A)[sP].[dR](T)[sP].[dR](T)[sP].[dR](A)[sP].[dR](T)[sP].[dR](A)[sP]. | | | |
| | | [dR](C)[sP].[dR](C)[sP].[dR](A)[sP].[dR](T)[sP].[dR](C)[sP].[LR](A)[sP].[LR](A) | | | |
| 1604 | 1604_29 | [LR](T)[sP].[LR](T)[sP].[dR](T)[sP].[dR](T)[sP].[dR](C)[sP].[dR](T)[sP].[dR](T)[sP]. | 73.1 | | 61.6 |
| | | [dR](C)[sP].[dR](A)[sP].[dR](T)[sP].[LR](T)[sP].[dR](A)[sP].[dR](T)[sP].[dR](A)[sP]. | | | |
| | | [dR](C)[sP].[dR](C)[sP].[dR](A)[sP].[dR](T)[sP].[dR](C)[sP].[LR](A)[sP].[LR](A) | | | |
| 1604 | 1604_30 | [LR](T)[sP].[LR](T)[sP].[dR](T)[sP].[dR](T)[sP].[dR](C)[sP].[LR](T)[sP].[dR](T)[sP]. | 57.8 | | 45.7 |
| | | [dR](C)[sP].[LR](A)[sP].[dR](T)[sP].[dR](T)[sP].[LR](A)[sP].[dR](T)[sP].[dR](A)[sP]. | | | |
| | | [dR](C)[sP].[dR](C)[sP].[dR](A)[sP].[dR](T)[sP].[dR](C)[sP].[LR](A)[sP].[LR](A) | | | |
| 1604 | 1604_31 | [LR](T)[sP].[LR](T)[sP].[dR](T)[sP].[dR](T)[sP].[dR](C)[sP].[dR](T)[sP].[dR](T)[sP]. | 48 | | 30.2 |
| | | [dR](C)[sP].[LR](A)[sP].[dR](T)[sP].[dR](T)[sP].[LR](A)[sP].[dR](T)[sP].[dR](A)[sP]. | | | |
| | | [dR](C)[sP].[LR]([5meC])[sP].[dR](A)[sP].[dR](T)[sP].[dR](C)[sP].[LR](A)[sP].[LR](A) | | | |
| 1604 | 1604_32 | [LR](T)[sP].[LR](T)[sP].[dR](T)[sP].[dR](T)[sP].[dR](C)[sP].[dR](T)[sP].[dR](T)[sP]. | 38.9 | | 28.7 |
| | | [LR]([5meC])[sP].[dR](A)[sP].[dR](T)[sP].[dR](T)[sP].[dR](A)[sP].[dR](T)[sP].[dR](A)[sP]. | | | |
| | | [dR](C)[sP].[dR](C)[sP].[LR](A)[sP].[dR](T)[sP].[dR](C)[sP].[LR](A)[sP].[LR](A) | | | |
| 1604 | 1604_33 | [LR](T)[sP].[LR](T)[sP].[dR](T)[sP].[dR](T)[sP].[dR](C)[sP].[dR](T)[sP].[dR](T)[sP]. | 43.3 | | 29.4 |
| | | [dR](C)[sP].[LR](A)[sP].[dR](T)[sP].[dR](T)[sP].[LR](A)[sP].[dR](T)[sP].[dR](A)[sP]. | | | |
| | | [dR](C)[sP].[dR](C)[sP].[dR](A)[sP].[LR](T)[sP].[dR](C)[sP].[LR](A)[sP].[LR](A) | | | |
| 1604 | 1604_34 | [LR](T)[sP].[LR](T)[sP].[dR](T)[sP].[dR](T)[sP].[dR](C)[sP].[dR](T)[sP].[dR](T)[sP]. | 47.9 | | 33.1 |
| | | [dR](C)[sP].[LR](A)[sP].[dR](T)[sP].[LR](T)[sP].[dR](A)[sP].[dR](T)[sP].[dR](A)[sP]. | | | |
| | | [dR](C)[sP].[dR](C)[sP].[dR](A)[sP].[dR](T)[sP].[dR](C)[sP].[LR](A)[sP].[LR](A) | | | |
| 1604 | 1604_35 | [LR](T)[sP].[LR](T)[sP].[dR](T)[sP].[dR](T)[sP].[dR](C)[sP].[dR](T)[sP].[dR](T)[sP]. | 36.5 | | 24.3 |
| | | [dR](C)[sP].[LR](A)[sP].[dR](T)[sP].[dR](T)[sP].[dR](A)[sP].[dR](T)[sP].[LR](A)[sP]. | | | |
| | | [dR](C)[sP].[LR]([5meC])[sP].[dR](A)[sP].[dR](T)[sP].[dR](C)[sP].[LR](A)[sP].[LR](A) | | | |
| 1604 | 1604_36 | [LR](T)[sP].[LR](T)[sP].[dR](T)[sP].[dR](T)[sP].[dR](C)[sP].[dR](T)[sP].[dR](T)[sP]. | 60.9 | | 43.7 |
| | | [dR](C)[sP].[dR](A)[sP].[dR](T)[sP].[LR](T)[sP].[dR](A)[sP].[dR](T)[sP].[dR](A)[sP]. | | | |
| | | [dR](C)[sP].[dR](C)[sP].[LR](A)[sP].[dR](T)[sP].[dR](C)[sP].[LR](A)[sP].[LR](A) | | | |
| 1604 | 1604_37 | [LR](T)[sP].[LR](T)[sP].[dR](T)[sP].[dR](T)[sP].[dR](C)[sP].[dR](T)[sP].[dR](T)[sP]. | 50.9 | | 31 |
| | | [dR](C)[sP].[LR](A)[sP].[dR](T)[sP].[LR](T)[sP].[dR](A)[sP].[dR](T)[sP].[dR](A)[sP]. | | | |
| | | [dR](C)[sP].[dR](C)[sP].[LR](A)[sP].[dR](T)[sP].[dR](C)[sP].[LR](A)[sP].[LR](A) | | | |
| 1604 | 1604_38 | [LR](T)[sP].[LR](T)[sP].[dR](T)[sP].[dR](T)[sP].[dR](C)[sP].[dR](T)[sP].[dR](T)[sP]. | 57 | | 40.9 |
| | | [dR](C)[sP].[dR](A)[sP].[dR](T)[sP].[dR](T)[sP].[dR](A)[sP].[dR](T)[sP].[dR](A)[sP]. | | | |
| | | [LR]([5meC])[sP].[dR](C)[sP].[LR](A)[sP].[dR](T)[sP].[dR](C)[sP].[LR](A)[sP].[LR](A) | | | |
| 1604 | 1604_39 | [LR](T)[sP].[LR](T)[sP].[dR](T)[sP].[dR](T)[sP].[dR](C)[sP].[dR](T)[sP].[dR](T)[sP]. | 46.4 | | 26.9 |
| | | [dR](C)[sP].[LR](A)[sP].[dR](T)[sP].[dR](T)[sP].[dR](A)[sP].[dR](T)[sP].[LR](A)[sP]. | | | |
| | | [dR](C)[sP].[dR](C)[sP].[dR](A)[sP].[LR](T)[sP].[dR](C)[sP].[LR](A)[sP].[LR](A) | | | |
| 1604 | 1604_40 | [LR](T)[sP].[LR](T)[sP].[dR](T)[sP].[dR](T)[sP].[dR](C)[sP].[dR](T)[sP].[dR](T)[sP]. | 54 | | 39.7 |
| | | [dR](C)[sP].[dR](A)[sP].[dR](T)[sP].[dR](T)[sP].[LR](A)[sP].[dR](T)[sP].[LR](A)[sP]. | | | |
| | | [dR](C)[sP].[dR](C)[sP].[dR](A)[sP].[LR](T)[sP].[dR](C)[sP].[LR](A)[sP].[LR](A) | | | |
| 1604 | 1604_41 | [LR](T)[sP].[LR](T)[sP].[dR](T)[sP].[LR](T)[sP].[dR](C)[sP].[dR](T)[sP].[dR](T)[sP]. | 41.9 | | 33.1 |
| | | [dR](C)[sP].[dR](A)[sP].[LR](T)[sP].[dR](T)[sP].[LR](A)[sP].[dR](T)[sP].[dR](A)[sP]. | | | |
| | | [dR](C)[sP].[dR](C)[sP].[dR](A)[sP].[dR](T)[sP].[dR](C)[sP].[LR](A)[sP].[LR](A) | | | |
| 1604 | 1604_42 | [LR](T)[sP].[LR](T)[sP].[dR](T)[sP].[dR](T)[sP].[dR](C)[sP].[dR](T)[sP].[LR](T)[sP]. | 61.9 | | 37.5 |
| | | [dR](C)[sP].[dR](A)[sP].[LR](T)[sP].[dR](T)[sP].[LR](A)[sP].[dR](T)[sP].[dR](A)[sP]. | | | |
| | | [dR](C)[sP].[dR](C)[sP].[dR](A)[sP].[dR](T)[sP].[dR](C)[sP].[LR](A)[sP].[LR](A) | | | |
| 1604 | 1604_43 | [LR](T)[sP].[LR](T)[sP].[dR](T)[sP].[dR](T)[sP].[dR](C)[sP].[dR](T)[sP].[dR](T)[sP]. | 55.6 | | 37.1 |
| | | [dR](C)[sP].[LR](A)[sP].[dR](T)[sP].[dR](T)[sP].[dR](A)[sP].[LR](T)[sP].[dR](A)[sP]. | | | |
| | | [dR](C)[sP].[dR](C)[sP].[dR](A)[sP].[dR](T)[sP].[dR](C)[sP].[LR](A)[sP].[LR](A) | | | |
| 1604 | 1604_44 | [LR](T)[sP].[LR](T)[sP].[dR](T)[sP].[dR](T)[sP].[dR](C)[sP].[dR](T)[sP].[dR](T)[sP]. | 51.1 | | 36.4 |
| | | [dR](C)[sP].[LR](A)[sP].[dR](T)[sP].[dR](T)[sP].[LR](A)[sP].[dR](T)[sP].[dR](A)[sP]. | | | |
| | | [LR]([5meC])[sP].[dR](C)[sP].[dR](A)[sP].[dR](T)[sP].[dR](C)[sP].[LR](A)[sP].[LR](A) | | | |
| 1604 | 1604_45 | [LR](T)[sP].[LR](T)[sP].[LR](T)[sP].[dR](T)[sP].[dR](C)[sP].[dR](T)[sP].[dR](T)[sP]. | 46.5 | | 29.7 |
| | | [dR](C)[sP].[LR](A)[sP].[dR](T)[sP].[dR](T)[sP].[dR](A)[sP].[dR](T)[sP].[dR](A)[sP]. | | | |
| | | [dR](C)[sP].[dR](C)[sP].[LR](A)[sP].[dR](T)[sP].[dR](C)[sP].[LR](A)[sP].[LR](A) | | | |
| 1604 | 1604_46 | [LR](T)[sP].[LR](T)[sP].[dR](T)[sP].[LR](T)[sP].[dR](C)[sP].[dR](T)[sP].[dR](T)[sP]. | 46.5 | | 32.2 |
| | | [dR](C)[sP].[dR](A)[sP].[LR](T)[sP].[dR](T)[sP].[dR](A)[sP].[dR](T)[sP].[dR](A)[sP]. | | | |
| | | [dR](C)[sP].[dR](C)[sP].[LR](A)[sP].[dR](T)[sP].[dR](C)[sP].[LR](A)[sP].[LR](A) | | | |
| 1604 | 1604_47 | [LR](T)[sP].[LR](T)[sP].[dR](T)[sP].[dR](T)[sP].[dR](C)[sP].[dR](T)[sP].[LR](T)[sP]. | 42.4 | | 32.2 |
| | | [dR](C)[sP].[dR](A)[sP].[LR](T)[sP].[dR](T)[sP].[dR](A)[sP].[dR](T)[sP].[dR](A)[sP]. | | | |
| | | [dR](C)[sP].[dR](C)[sP].[LR](A)[sP].[dR](T)[sP].[dR](C)[sP].[LR](A)[sP].[LR](A) | | | |
| 1604 | 1604_48 | [LR](T)[sP].[LR](T)[sP].[dR](T)[sP].[dR](T)[sP].[dR](C)[sP].[dR](T)[sP].[dR](T)[sP]. | 39.6 | | 28.8 |
| | | [dR](C)[sP].[LR](A)[sP].[dR](T)[sP].[dR](T)[sP].[dR](A)[sP].[dR](T)[sP].[dR](A)[sP]. | | | |
| | | [LR]([5meC])[sP].[dR](C)[sP].[LR](A)[sP].[dR](T)[sP].[dR](C)[sP].[LR](A)[sP].[LR](A) | | | |
| 1604 | 1604_49 | [LR](T)[sP].[LR](T)[sP].[dR](T)[sP].[LR](T)[sP].[dR](C)[sP].[dR](T)[sP].[dR](T)[sP]. | 19.9 | | 20.8 |
| | | [dR](C)[sP].[LR](A)[sP].[dR](T)[sP].[dR](T)[sP].[dR](A)[sP].[dR](T)[sP].[dR](A)[sP]. | | | |
| | | [dR](C)[sP].[dR](C)[sP].[dR](A)[sP].[LR](T)[sP].[dR](C)[sP].[LR](A)[sP].[LR](A) | | | |
| 1604 | 1604_50 | [LR](T)[sP].[LR](T)[sP].[dR](T)[sP].[dR](T)[sP].[dR](C)[sP].[dR](T)[sP].[LR](T)[sP]. | 17.5 | | 17.8 |
| | | [dR](C)[sP].[LR](A)[sP].[dR](T)[sP].[dR](T)[sP].[dR](A)[sP].[dR](T)[sP].[dR](A)[sP]. | | | |
| | | [dR](C)[sP].[dR](C)[sP].[dR](A)[sP].[LR](T)[sP].[dR](C)[sP].[LR](A)[sP].[LR](A) | | | |
| 1604 | 1604_51 | [LR](T)[sP].[LR](T)[sP].[LR](T)[sP].[dR](T)[sP].[dR](C)[sP].[dR](T)[sP].[dR](T)[sP]. | 51.8 | | 34.5 |
| | | [dR](C)[sP].[LR](A)[sP].[dR](T)[sP].[dR](T)[sP].[LR](A)[sP].[dR](T)[sP].[dR](A)[sP]. | | | |
| | | [dR](C)[sP].[dR](C)[sP].[dR](A)[sP].[dR](T)[sP].[dR](C)[sP].[LR](A)[sP].[LR](A) | | | |
| 1604 | 1604_52 | [LR](T)[sP].[LR](T)[sP].[dR](T)[sP].[dR](T)[sP].[dR](C)[sP].[dR](T)[sP].[dR](T)[sP]. | 46.7 | | 32.1 |
| | | [dR](C)[sP].[LR](A)[sP].[dR](T)[sP].[LR](T)[sP].[dR](A)[sP].[dR](T)[sP].[LR](A)[sP]. | | | |
| | | [dR](C)[sP].[dR](C)[sP].[dR](A)[sP].[dR](T)[sP].[dR](C)[sP].[LR](A)[sP].[LR](A) | | | |
| 1604 | 1604_53 | [LR](T)[sP].[LR](T)[sP].[dR](T)[sP].[dR](T)[sP].[dR](C)[sP].[dR](T)[sP].[dR](T)[sP]. | 33.5 | | 26.4 |
| | | [dR](C)[sP].[LR](A)[sP].[dR](T)[sP].[mR](U)[sP].[dR](A)[sP].[dR](T)[sP].[dR](A)[sP]. | | | |
| | | [dR](C)[sP].[dR](C)[sP].[dR](A)[sP].[LR](T)[sP].[LR]([5meC])[sP].[LR](A)[sP].[LR](A) | | | |
| 1604 | 1604_54 | [LR](T)[sP].[LR](T)[sP].[dR](T)[sP].[dR](T)[sP].[dR](C)[sP].[dR](T)[sP].[dR](T)[sP]. | 50.4 | | 40.3 |
| | | [dR](C)[sP].[mR](A)[sP].[dR](T)[sP].[mR](U)[sP].[dR](A)[sP].[dR](T)[sP].[dR](A)[sP]. | | | |
| | | [dR](C)[sP].[dR](C)[sP].[dR](A)[sP].[LR](T)[sP].[LR]([5meC])[sP].[LR](A)[sP].[LR](A) | | | |
| 1604 | 1604_55 | [LR](T)[sP].[LR](T)[sP].[dR](T)[sP].[dR](T)[sP].[dR](C)[sP].[dR](T)[sP].[dR](T)[sP]. | 37.8 | | 29.7 |
| | | [dR](C)[sP].[mR](A)[sP].[dR](T)[sP].[LR](T)[sP].[dR](A)[sP].[dR](T)[sP].[dR](A)[sP]. | | | |
| | | [dR](C)[sP].[dR](C)[sP].[dR](A)[sP].[LR](T)[sP].[LR]([5meC])[sP].[LR](A)[sP].[LR](A) | | | |
| 1604 | 1604_56 | [LR](T)[sP].[LR](T)[sP].[dR](T)[sP].[dR](T)[sP].[dR](C)[sP].[dR](T)[sP].[dR](T)[sP]. | 29.4 | | 21.2 |
| | | [LR]([5meC])[sP].[mR](A)[sP].[dR](T)[sP].[dR](T)[sP].[dR](A)[sP].[dR](T)[sP].[dR](A)[sP]. | | | |
| | | [dR](C)[sP].[LR]([5meC])[sP].[dR](A)[sP].[LR](T)[sP].[dR](C)[sP].[LR](A)[sP].[LR](A) | | | |
| 1604 | 1604_57 | [LR](T)[sP].[LR](T)[sP].[dR](T)[sP].[dR](T)[sP].[dR](C)[sP].[dR](T)[sP].[dR](T)[sP]. | 19.8 | | 22.3 |
| | | [mR](C)[sP].[LR](A)[sP].[dR](T)[sP].[dR](T)[sP].[dR](A)[sP].[dR](T)[sP].[dR](A)[sP]. | | | |
| | | [dR](C)[sP].[LR]([5meC])[sP].[dR](A)[sP].[LR](T)[sP].[dR](C)[sP].[LR](A)[sP].[LR](A) | | | |
| 1604 | 1604_58 | [LR](T)[sP].[LR](T)[sP].[dR](T)[sP].[dR](T)[sP].[dR](C)[sP].[dR](T)[sP].[dR](T)[sP]. | 32.1 | | 26.9 |
| | | [mR](C)[sP].[mR](A)[sP].[dR](T)[sP].[dR](T)[sP].[dR](A)[sP].[dR](T)[sP].[dR](A)[sP]. | | | |
| | | [dR](C)[sP].[LR]([5meC])[sP].[dR](A)[sP].[LR](T)[sP].[dR](C)[sP].[LR](A)[sP].[LR](A) | | | |
| 1605 | 1605_2 | [LR](T)[sP].[LR]([5meC])[sP].[dR](T)[sP].[LR](T)[sP].[dR](C)[sP].[LR](A)[sP].[dR](T)[sP]. | 3.4 | | 9.06 |
| | | [dR](T)[sP].[dR](A)[sP].[dR](T)[sP].[dR](A)[sP].[dR](C)[sP].[dR](C)[sP].[dR](A)[sP]. | | | |
| | | [dR](T)[sP].[LR]([5meC])[sP].[LR](A)[sP].[LR](A) | | | |
| 1605 | 1605_3 | [LR](T)[sP].[LR]([5meC])[sP].[dR](T)[sP].[LR](T)[sP].[dR](C)[sP].[dR](A)[sP].[dR](T)[sP]. | 4.71 | | 9.08 |
| | | [dR](T)[sP].[dR](A)[sP].[dR](T)[sP].[dR](A)[sP].[dR](C)[sP].[dR](C)[sP].[dR](A)[sP]. | | | |
| | | [dR](T)[sP].[LR]([5meC])[sP].[LR](A)[sP].[LR](A) | | | |
| 1605 | 1605_4 | [LR](T)[sP].[LR]([5meC])[sP].[dR](T)[sP].[LR](T)[sP].[dR](C)[sP].[dR](A)[sP].[dR](T)[sP]. | 9.05 | | 12.1 |
| | | [dR](T)[sP].[dR](A)[sP].[dR](T)[sP].[dR](A)[sP].[dR](C)[sP].[dR](C)[sP].[LR](A)[sP]. | | | |
| | | [dR](T)[sP].[LR]([5meC])[sP].[LR](A)[sP].[LR](A) | | | |
| 1605 | 1605_5 | [LR](T)[sP].[LR]([5meC])[sP].[LR](T)[sP].[dR](T)[sP].[LR]([5meC])[sP].[dR](A)[sP]. | 12.2 | 11.2 | 28.1 |
| | | [dR](T)[sP].[dR](T)[sP].[dR](A)[sP].[dR](T)[sP].[dR](A)[sP].[dR](C)[sP].[dR](C)[sP]. | | | |
| | | [dR](A)[sP].[LR](T)[sP].[LR]([5meC])[sP].[LR](A)[sP].[LR](A) | | | |
| 1605 | 1605_6 | [LR](T)[sP].[LR]([5meC])[sP].[dR](T)[sP].[LR](T)[sP].[dR](C)[sP].[dR](A)[sP].[LR](T)[sP]. | 23.6 | | 23 |
| | | [dR](T)[sP].[dR](A)[sP].[dR](T)[sP].[dR](A)[sP].[dR](C)[sP].[dR](C)[sP].[dR](A)[sP]. | | | |
| | | [LR](T)[sP].[dR](C)[sP].[LR](A)[sP].[LR](A) | | | |
| 1605 | 1605_7 | [LR](T)[sP].[LR]([5meC])[sP].[dR](T)[sP].[LR](T)[sP].[dR](C)[sP].[dR](A)[sP].[dR](T)[sP]. | 25.5 | | 24.2 |
| | | [dR](T)[sP].[dR](A)[sP].[dR](T)[sP].[dR](A)[sP].[dR](C)[sP].[LR]([5meC])[sP].[dR](A)[sP]. | | | |
| | | [LR](T)[sP].[dR](C)[sP].[LR](A)[sP].[LR](A) | | | |
| 1605 | 1605_8 | [LR](T)[sP].[LR]([5meC])[sP].[dR](T)[sP].[LR](T)[sP].[dR](C)[sP].[dR](A)[sP].[dR](T)[sP]. | 43.8 | | 34.6 |
| | | [LR](T)[sP].[dR](A)[sP].[dR](T)[sP].[dR](A)[sP].[dR](C)[sP].[dR](C)[sP].[dR](A)[sP]. | | | |
| | | [LR](T)[sP].[dR](C)[sP].[LR](A)[sP].[LR](A) | | | |
| 1605 | 1605_9 | [LR](T)[sP].[LR]([5meC])[sP].[LR](T)[sP].[dR](T)[sP].[dR](C)[sP].[dR](A)[sP].[dR](T)[sP]. | 38.5 | | 40.2 |
| | | [dR](T)[sP].[dR](A)[sP].[dR](T)[sP].[dR](A)[sP].[dR](C)[sP].[dR](C)[sP].[dR](A)[sP]. | | | |
| | | [LR](T)[sP].[dR](C)[sP].[LR](A)[sP].[LR](A) | | | |
| 1605 | 1605_10 | [LR](T)[sP].[LR]([5meC])[sP].[dR](T)[sP].[dR](T)[sP].[LR]([5meC])[sP].[dR](A)[sP]. | 13.9 | | 16.8 |
| | | [LR](T)[sP].[dR](T)[sP].[dR](A)[sP].[dR](T)[sP].[dR](A)[sP].[dR](C)[sP].[dR](C)[sP]. | | | |
| | | [dR](A)[sP].[LR](T)[sP].[dR](C)[sP].[LR](A)[sP].[LR](A) | | | |
| 1605 | 1605_11 | [LR](T)[sP].[LR]([5meC])[sP].[dR](T)[sP].[LR](T)[sP].[dR](C)[sP].[dR](A)[sP].[dR](T)[sP]. | 30.9 | | 34.3 |
| | | [dR](T)[sP].[dR](A)[sP].[dR](T)[sP].[dR](A)[sP].[LR]([5meC])[sP].[dR](C)[sP].[dR](A)[sP]. | | | |
| | | [LR](T)[sP].[dR](C)[sP].[LR](A)[sP].[LR](A) | | | |
| 1605 | 1605_12 | [LR](T)[sP].[LR]([5meC])[sP].[LR](T)[sP].[dR](T)[sP].[dR](C)[sP].[LR](A)[sP].[dR](T)[sP]. | 20.7 | | 22.9 |
| | | [dR](T)[sP].[dR](A)[sP].[dR](T)[sP].[dR](A)[sP].[dR](C)[sP].[dR](C)[sP].[dR](A)[sP]. | | | |
| | | [LR](T)[sP].[dR](C)[sP].[LR](A)[sP].[LR](A) | | | |
| 1605 | 1605_13 | [LR](T)[sP].[LR]([5meC])[sP].[dR](T)[sP].[dR](T)[sP].[LR]([5meC])[sP].[dR](A)[sP]. | 16.6 | | 16.6 |
| | | [dR](T)[sP].[dR](T)[sP].[dR](A)[sP].[dR](T)[sP].[dR](A)[sP].[dR](C)[sP].[LR]([5meC])[sP]. | | | |
| | | [dR](A)[sP].[LR](T)[sP].[dR](C)[sP].[LR](A)[sP].[LR](A) | | | |
| 1605 | 1605_14 | [LR](T)[sP].[LR]([5meC])[sP].[dR](T)[sP].[LR](T)[sP].[dR](C)[sP].[dR](A)[sP].[dR](T)[sP]. | 12.7 | | 15.2 |
| | | [dR](T)[sP].[dR](A)[sP].[dR](T)[sP].[dR](A)[sP].[dR](C)[sP].[dR](C)[sP].[LR](A)[sP]. | | | |
| | | [LR](T)[sP].[dR](C)[sP].[LR](A)[sP].[LR](A) | | | |
| 1605 | 1605_15 | [LR](T)[sP].[LR]([5meC])[sP].[dR](T)[sP].[LR](T)[sP].[dR](C)[sP].[LR](A)[sP].[dR](T)[sP]. | 15.1 | | 16.6 |
| | | [dR](T)[sP].[dR](A)[sP].[dR](T)[sP].[dR](A)[sP].[dR](C)[sP].[dR](C)[sP].[LR](A)[sP]. | | | |
| | | [LR](T)[sP].[dR](C)[sP].[LR](A)[sP].[LR](A) | | | |
| 1605 | 1605_16 | [LR](T)[sP].[LR]([5meC])[sP].[LR](T)[sP].[dR](T)[sP].[LR]([5meC])[sP].[dR](A)[sP]. | 14.2 | | 20.1 |
| | | [dR](T)[sP].[dR](T)[sP].[dR](A)[sP].[dR](T)[sP].[dR](A)[sP].[dR](C)[sP].[dR](C)[sP]. | | | |
| | | [dR](A)[sP].[dR](T)[sP].[dR](C)[sP].[LR](A)[sP].[LR](A) | | | |
| 1605 | 1605_17 | [LR](T)[sP].[LR]([5meC])[sP].[LR](T)[sP].[dR](T)[sP].[LR]([5meC])[sP].[dR](A)[sP]. | 20.3 | | 24.2 |
| | | [dR](T)[sP].[dR](T)[sP].[dR](A)[sP].[dR](T)[sP].[dR](A)[sP].[dR](C)[sP].[dR](C)[sP]. | | | |
| | | [LR](A)[sP].[dR](T)[sP].[dR](C)[sP].[LR](A)[sP].[LR](A) | | | |
| 1605 | 1605_18 | [LR](T)[sP].[LR]([5meC])[sP].[dR](T)[sP].[dR](T)[sP].[LR]([5meC])[sP].[dR](A)[sP]. | 29.5 | | 26 |
| | | [dR](T)[sP].[LR](T)[sP].[dR](A)[sP].[dR](T)[sP].[dR](A)[sP].[dR](C)[sP].[dR](C)[sP]. | | | |
| | | [dR](A)[sP].[LR](T)[sP].[dR](C)[sP].[LR](A)[sP].[LR](A) | | | |
| 1605 | 1605_19 | [LR](T)[sP].[LR]([5meC])[sP].[LR](T)[sP].[dR](T)[sP].[dR](C)[sP].[dR](A)[sP].[dR](T)[sP]. | 51.5 | | 43.6 |
| | | [dR](T)[sP].[dR](A)[sP].[dR](T)[sP].[LR](A)[sP].[dR](C)[sP].[dR](C)[sP].[dR](A)[sP]. | | | |
| | | [LR](T)[sP].[dR](C)[sP].[LR](A)[sP].[LR](A) | | | |
| 1605 | 1605_20 | [LR](T)[sP].[LR]([5meC])[sP].[LR](T)[sP].[dR](T)[sP].[LR]([5meC])[sP].[dR](A)[sP]. | 56.5 | | 48.3 |
| | | [dR](T)[sP].[dR](T)[sP].[LR](A)[sP].[dR](T)[sP].[dR](A)[sP].[dR](C)[sP].[dR](C)[sP]. | | | |
| | | [dR](A)[sP].[dR](T)[sP].[dR](C)[sP].[LR](A)[sP].[LR](A) | | | |
| 1605 | 1605_21 | [LR](T)[sP].[LR]([5meC])[sP].[dR](T)[sP].[dR](T)[sP].[LR]([5meC])[sP].[dR](A)[sP]. | 27.1 | | 27.3 |
| | | [dR](T)[sP].[dR](T)[sP].[dR](A)[sP].[dR](T)[sP].[dR](A)[sP].[LR]([5meC])[sP].[dR](C)[sP]. | | | |
| | | [dR](A)[sP].[LR](T)[sP].[dR](C)[sP].[LR](A)[sP].[LR](A) | | | |
| 1605 | 1605_22 | [LR](T)[sP].[LR]([5meC])[sP].[dR](T)[sP].[LR](T)[sP].[dR](C)[sP].[dR](A)[sP].[dR](T)[sP]. | 52.3 | | 49.2 |
| | | [dR](T)[sP].[dR](A)[sP].[dR](T)[sP].[LR](A)[sP].[dR](C)[sP].[dR](C)[sP].[LR](A)[sP]. | | | |
| | | [LR](T)[sP].[dR](C)[sP].[LR](A)[sP].[LR](A) | | | |
| 1605 | 1605_23 | [LR](T)[sP].[LR]([5meC])[sP].[dR](T)[sP].[dR](T)[sP].[LR]([5meC])[sP].[dR](A)[sP]. | 7.41 | | 12 |
| | | [dR](T)[sP].[dR](T)[sP].[dR](A)[sP].[dR](T)[sP].[dR](A)[sP].[dR](C)[sP].[dR](C)[sP]. | | | |
| | | [LR](A)[sP].[LR](T)[sP].[dR](C)[sP].[LR](A)[sP].[LR](A) | | | |
| 1605 | 1605_24 | [LR](T)[sP].[LR]([5meC])[sP].[dR](T)[sP].[dR](T)[sP].[dR](C)[sP].[dR](A)[sP].[dR](T)[sP]. | 30.4 | | 31.4 |
| | | [dR](T)[sP].[dR](A)[sP].[dR](T)[sP].[dR](A)[sP].[dR](C)[sP].[dR](C)[sP].[dR](A)[sP]. | | | |
| | | [dR](T)[sP].[LR]([5meC])[sP].[LR](A)[sP].[LR](A) | | | |
| 1605 | 1605_25 | [LR](T)[sP].[LR]([5meC])[sP].[LR](T)[sP].[LR](T)[sP].[dR](C)[sP].[LR](A)[sP].[dR](T)[sP]. | 21.9 | | 31.3 |
| | | [dR](T)[sP].[dR](A)[sP].[dR](T)[sP].[dR](A)[sP].[dR](C)[sP].[dR](C)[sP].[dR](A)[sP]. | | | |
| | | [dR](T)[sP].[dR](C)[sP].[LR](A)[sP].[LR](A) | | | |
| 1605 | 1605_26 | [LR](T)[sP].[LR]([5meC])[sP].[LR](T)[sP].[LR](T)[sP].[dR](C)[sP].[dR](A)[sP].[dR](T)[sP]. | 22.6 | | 26.2 |
| | | [dR](T)[sP].[dR](A)[sP].[dR](T)[sP].[dR](A)[sP].[dR](C)[sP].[dR](C)[sP].[LR](A)[sP]. | | | |
| | | [dR](T)[sP].[dR](C)[sP].[LR](A)[sP].[LR](A) | | | |
| 1605 | 1605_27 | [LR](T)[sP].[LR]([5meC])[sP].[dR](T)[sP].[LR](T)[sP].[LR]([5meC])[sP].[dR](A)[sP]. | 17 | | 21.1 |
| | | [dR](T)[sP].[dR](T)[sP].[dR](A)[sP].[dR](T)[sP].[dR](A)[sP].[dR](C)[sP].[dR](C)[sP]. | | | |
| | | [dR](A)[sP].[LR](T)[sP].[dR](C)[sP].[LR](A)[sP].[LR](A) | | | |
| 1605 | 1605_28 | [LR](T)[sP].[LR]([5meC])[sP].[LR](T)[sP].[dR](T)[sP].[dR](C)[sP].[dR](A)[sP].[LR](T)[sP]. | 59.9 | | 59.6 |
| | | [dR](T)[sP].[dR](A)[sP].[dR](T)[sP].[dR](A)[sP].[dR](C)[sP].[dR](C)[sP].[dR](A)[sP]. | | | |
| | | [LR](T)[sP].[dR](C)[sP].[LR](A)[sP].[LR](A) | | | |
| 1605 | 1605_29 | [LR](T)[sP].[LR]([5meC])[sP].[dR](T)[sP].[LR](T)[sP].[dR](C)[sP].[dR](A)[sP].[LR](T)[sP]. | 43.9 | | 43.4 |
| | | [dR](T)[sP].[dR](A)[sP].[dR](T)[sP].[dR](A)[sP].[dR](C)[sP].[dR](C)[sP].[LR](A)[sP]. | | | |
| | | [LR](T)[sP].[dR](C)[sP].[LR](A)[sP].[LR](A) | | | |
| 1605 | 1605_30 | [LR](T)[sP].[LR]([5meC])[sP].[dR](T)[sP].[dR](T)[sP].[dR](C)[sP].[LR](A)[sP].[dR](T)[sP]. | 13.6 | | 16.8 |
| | | [dR](T)[sP].[dR](A)[sP].[dR](T)[sP].[dR](A)[sP].[dR](C)[sP].[dR](C)[sP].[dR](A)[sP]. | | | |
| | | [dR](T)[sP].[LR]([5meC])[sP].[LR](A)[sP].[LR](A) | | | |
| 1605 | 1605_31 | [LR](T)[sP].[LR]([5meC])[sP].[dR](T)[sP].[dR](T)[sP].[dR](C)[sP].[dR](A)[sP].[dR](T)[sP]. | 19.3 | | 18.9 |
| | | [dR](T)[sP].[dR](A)[sP].[dR](T)[sP].[dR](A)[sP].[dR](C)[sP].[dR](C)[sP].[LR](A)[sP]. | | | |
| | | [dR](T)[sP].[LR]([5meC])[sP].[LR](A)[sP].[LR](A) | | | |
| 1605 | 1605_32 | [LR](T)[sP].[LR]([5meC])[sP].[LR](T)[sP].[dR](T)[sP].[LR]([5meC])[sP].[dR](A)[sP]. | 38 | | 38.5 |
| | | [LR](T)[sP].[dR](T)[sP].[dR](A)[sP].[dR](T)[sP].[dR](A)[sP].[dR](C)[sP].[dR](C)[sP]. | | | |
| | | [dR](A)[sP].[dR](T)[sP].[dR](C)[sP].[LR](A)[sP].[LR](A) | | | |
| 1605 | 1605_33 | [LR](T)[sP].[LR]([5meC])[sP].[LR](T)[sP].[dR](T)[sP].[dR](C)[sP].[dR](A)[sP].[dR](T)[sP]. | 20.3 | | 25.7 |
| | | [dR](T)[sP].[dR](A)[sP].[dR](T)[sP].[dR](A)[sP].[dR](C)[sP].[LR]([5meC])[sP].[dR](A)[sP]. | | | |
| | | [LR](T)[sP].[dR](C)[sP].[LR](A)[sP].[LR](A) | | | |
| 1605 | 1605_34 | [LR](T)[sP].[LR]([5meC])[sP].[LR](T)[sP].[dR](T)[sP].[LR]([5meC])[sP].[dR](A)[sP]. | 13.6 | | 20.2 |
| | | [dR](T)[sP].[dR](T)[sP].[dR](A)[sP].[dR](T)[sP].[dR](A)[sP].[dR](C)[sP].[dR](C)[sP]. | | | |
| | | [dR](A)[sP].[LR](T)[sP].[dR](C)[sP].[LR](A)[sP].[LR](A) | | | |
| 1605 | 1605_35 | [LR](T)[sP].[LR]([5meC])[sP].[LR](T)[sP].[dR](T)[sP].[LR]([5meC])[sP].[dR](A)[sP]. | 31 | | 38.4 |
| | | [dR](T)[sP].[dR](T)[sP].[dR](A)[sP].[dR](T)[sP].[dR](A)[sP].[dR](C)[sP].[LR]([5meC])[sP]. | | | |
| | | [dR](A)[sP].[dR](T)[sP].[dR](C)[sP].[LR](A)[sP].[LR](A) | | | |
| 1605 | 1605_36 | [LR](T)[sP].[LR]([5meC])[sP].[LR](T)[sP].[dR](T)[sP].[dR](C)[sP].[dR](A)[sP].[dR](T)[sP]. | 54.2 | | 44.9 |
| | | [LR](T)[sP].[dR](A)[sP].[dR](T)[sP].[dR](A)[sP].[dR](C)[sP].[dR](C)[sP].[dR](A)[sP]. | | | |
| | | [LR](T)[sP].[dR](C)[sP].[LR](A)[sP].[LR](A) | | | |
| 1605 | 1605_37 | [LR](T)[sP].[LR]([5meC])[sP].[LR](T)[sP].[dR](T)[sP].[dR](C)[sP].[dR](A)[sP].[dR](T)[sP]. | 42.9 | | 45.2 |
| | | [dR](T)[sP].[dR](A)[sP].[dR](T)[sP].[dR](A)[sP].[LR]([5meC])[sP].[dR](C)[sP].[dR](A)[sP]. | | | |
| | | [LR](T)[sP].[dR](C)[sP].[LR](A)[sP].[LR](A) | | | |
| 1605 | 1605_38 | [LR](T)[sP].[LR]([5meC])[sP].[LR](T)[sP].[dR](T)[sP].[LR]([5meC])[sP].[dR](A)[sP]. | 41.6 | | 33.9 |
| | | [dR](T)[sP].[LR](T)[sP].[dR](A)[sP].[dR](T)[sP].[dR](A)[sP].[dR](C)[sP].[dR](C)[sP]. | | | |
| | | [dR](A)[sP].[dR](T)[sP].[dR](C)[sP].[LR](A)[sP].[LR](A) | | | |
| 1605 | 1605_39 | [LR](T)[sP].[LR]([5meC])[sP].[LR](T)[sP].[LR](T)[sP].[dR](C)[sP].[dR](A)[sP].[dR](T)[sP]. | 14.1 | | 18.2 |
| | | [dR](T)[sP].[dR](A)[sP].[dR](T)[sP].[dR](A)[sP].[dR](C)[sP].[dR](C)[sP].[dR](A)[sP]. | | | |
| | | [LR](T)[sP].[dR](C)[sP].[LR](A)[sP].[LR](A) | | | |
| 1605 | 1605_40 | [LR](T)[sP].[LR]([5meC])[sP].[LR](T)[sP].[dR](T)[sP].[dR](C)[sP].[dR](A)[sP].[dR](T)[sP]. | 27.8 | | 28.2 |
| | | [dR](T)[sP].[dR](A)[sP].[dR](T)[sP].[dR](A)[sP].[dR](C)[sP].[dR](C)[sP].[LR](A)[sP]. | | | |
| | | [LR](T)[sP].[dR](C)[sP].[LR](A)[sP].[LR](A) | | | |
| 1605 | 1605_41 | [LR](T)[sP].[LR]([5meC])[sP].[LR](T)[sP].[dR](T)[sP].[dR](C)[sP].[LR](A)[sP].[dR](T)[sP]. | 34.3 | | 21.2 |
| | | [dR](T)[sP].[dR](A)[sP].[dR](T)[sP].[dR](A)[sP].[dR](C)[sP].[dR](C)[sP].[LR](A)[sP]. | | | |
| | | [LR](T)[sP].[dR](C)[sP].[LR](A)[sP].[LR](A) | | | |
| 1605 | 1605_42 | [LR](T)[sP].[LR]([5meC])[sP].[dR](T)[sP].[LR](T)[sP].[dR](C)[sP].[dR](A)[sP].[dR](T)[sP]. | 63.6 | | 46.4 |
| | | [dR](T)[sP].[dR](A)[sP].[dR](T)[sP].[dR](A)[sP].[LR]([5meC])[sP].[dR](C)[sP].[LR](A)[sP]. | | | |
| | | [LR](T)[sP].[dR](C)[sP].[LR](A)[sP].[LR](A) | | | |
| 1605 | 1605_43 | [LR](T)[sP].[LR]([5meC])[sP].[dR](T)[sP].[LR](T)[sP].[dR](C)[sP].[dR](A)[sP].[dR](T)[sP]. | 31.3 | | 27.2 |
| | | [dR](T)[sP].[LR](A)[sP].[dR](T)[sP].[dR](A)[sP].[dR](C)[sP].[dR](C)[sP].[dR](A)[sP]. | | | |
| | | [dR](T)[sP].[LR]([5meC])[sP].[LR](A)[sP].[LR](A) | | | |
| 1605 | 1605_44 | [LR](T)[sP].[LR]([5meC])[sP].[dR](T)[sP].[LR](T)[sP].[dR](C)[sP].[LR](A)[sP].[dR](T)[sP]. | 58 | | 49.2 |
| | | [dR](T)[sP].[LR](A)[sP].[dR](T)[sP].[dR](A)[sP].[dR](C)[sP].[dR](C)[sP].[dR](A)[sP]. | | | |
| | | [dR](T)[sP].[LR]([5meC])[sP].[LR](A)[sP].[LR](A) | | | |
| 1605 | 1605_45 | [LR](T)[sP].[LR]([5meC])[sP].[LR](T)[sP].[dR](T)[sP].[LR]([5meC])[sP].[mR](A)[sP]. | 15.4 | | 29.3 |
| | | [dR](T)[sP].[dR](T)[sP].[dR](A)[sP].[dR](T)[sP].[dR](A)[sP].[dR](C)[sP].[dR](C)[sP]. | | | |
| | | [dR](A)[sP].[LR](T)[sP].[LR]([5meC])[sP].[LR](A)[sP].[LR](A) | | | |
| 1605 | 1605_46 | [LR](T)[sP].[LR]([5meC])[sP].[LR](T)[sP].[dR](T)[sP].[LR]([5meC])[sP].[dR](A)[sP]. | 27.6 | | 40.4 |
| | | [mR](U)[sP].[dR](T)[sP].[dR](A)[sP].[dR](T)[sP].[dR](A)[sP].[dR](C)[sP].[dR](C)[sP]. | | | |
| | | [dR](A)[sP].[LR](T)[sP].[LR]([5meC])[sP].[LR](A)[sP].[LR](A) | | | |
| 1605 | 1605_47 | [LR](T)[sP].[LR]([5meC])[sP].[LR](T)[sP].[dR](T)[sP].[mR](C)[sP].[dR](A)[sP].[dR](T)[sP]. | 5.99 | | 15.8 |
| | | [dR](T)[sP].[dR](A)[sP].[dR](T)[sP].[dR](A)[sP].[dR](C)[sP].[dR](C)[sP].[dR](A)[sP]. | | | |
| | | [LR](T)[sP].[LR]([5meC])[sP].[LR](A)[sP].[LR](A) | | | |
| 1605 | 1605_48 | [LR](T)[sP].[dR](C)[sP].[mR](U)[sP].[dR](T)[sP].[LR]([5meC])[sP].[dR](A)[sP].[dR](T)[sP]. | 8.74 | | 16.5 |
| | | [dR](T)[sP].[dR](A)[sP].[dR](T)[sP].[dR](A)[sP].[dR](C)[sP].[dR](C)[sP].[dR](A)[sP]. | | | |
| | | [LR](T)[sP].[LR]([5meC])[sP].[LR](A)[sP].[LR](A) | | | |
| 1606 | 1606_2 | [LR](T)[sP].[LR](T)[sP].[LR](T)[sP].[dR](C)[sP].[dR](T)[sP].[LR](T)[sP].[dR](C)[sP]. | 7.97 | 14.5 | 21.8 |
| | | [LR](A)[sP].[dR](T)[sP].[dR](T)[sP].[dR](A)[sP].[dR](T)[sP].[dR](A)[sP].[dR](C)[sP]. | | | |
| | | [dR](C)[sP].[dR](A)[sP].[dR](T)[sP].[LR]([5meC])[sP].[LR](A)[sP].[LR](A) | | | |
| 1606 | 1606_3 | [LR](T)[sP].[LR](T)[sP].[dR](T)[sP].[dR](C)[sP].[dR](T)[sP].[dR](T)[sP].[dR](C)[sP]. | | 67.8 | 58.9 |
| | | [dR](A)[sP].[dR](T)[sP].[LR](T)[sP].[dR](A)[sP].[LR](T)[sP].[dR](A)[sP].[dR](C)[sP]. | | | |
| | | [dR](C)[sP].[LR](A)[sP].[dR](T)[sP].[LR]([5meC])[sP].[LR](A)[sP].[LR](A) | | | |
| 1606 | 1606_4 | [LR](T)[sP].[LR](T)[sP].[dR](T)[sP].[dR](C)[sP].[dR](T)[sP].[LR](T)[sP].[dR](C)[sP]. | 58.9 | | 44.5 |
| | | [LR](A)[sP].[dR](T)[sP].[dR](T)[sP].[LR](A)[sP].[dR](T)[sP].[dR](A)[sP].[dR](C)[sP]. | | | |
| | | [dR](C)[sP].[dR](A)[sP].[dR](T)[sP].[dR](C)[sP].[LR](A)[sP].[LR](A) | | | |
| 1606 | 1606_5 | [LR](T)[sP].[LR](T)[sP].[dR](T)[sP].[dR](C)[sP].[dR](T)[sP].[LR](T)[sP].[dR](C)[sP]. | 38.7 | | 32.5 |
| | | [LR](A)[sP].[dR](T)[sP].[dR](T)[sP].[dR](A)[sP].[dR](T)[sP].[dR](A)[sP].[dR](C)[sP]. | | | |
| | | [dR](C)[sP].[LR](A)[sP].[dR](T)[sP].[dR](C)[sP].[LR](A)[sP].[LR](A) | | | |
| 1606 | 1606_6 | [LR](T)[sP].[LR](T)[sP].[dR](T)[sP].[dR](C)[sP].[dR](T)[sP].[LR](T)[sP].[dR](C)[sP]. | 53.4 | | 44.6 |
| | | [dR](A)[sP].[LR](T)[sP].[dR](T)[sP].[dR](A)[sP].[dR](T)[sP].[dR](A)[sP].[dR](C)[sP]. | | | |
| | | [dR](C)[sP].[dR](A)[sP].[dR](T)[sP].[dR](C)[sP].[LR](A)[sP].[LR](A) | | | |
| 1606 | 1606_7 | [LR](T)[sP].[LR](T)[sP].[dR](T)[sP].[dR](C)[sP].[dR](T)[sP].[LR](T)[sP].[dR](C)[sP]. | 63.6 | | 43.3 |
| | | [dR](A)[sP].[dR](T)[sP].[dR](T)[sP].[dR](A)[sP].[dR](T)[sP].[dR](A)[sP].[dR](C)[sP]. | | | |
| | | [dR](C)[sP].[dR](A)[sP].[LR](T)[sP].[dR](C)[sP].[LR](A)[sP].[LR](A) | | | |
| 1606 | 1606_8 | [LR](T)[sP].[LR](T)[sP].[dR](T)[sP].[dR](C)[sP].[dR](T)[sP].[LR](T)[sP].[dR](C)[sP]. | 26 | | 27.9 |
| | | [LR](A)[sP].[dR](T)[sP].[dR](T)[sP].[dR](A)[sP].[dR](T)[sP].[dR](A)[sP].[dR](C)[sP]. | | | |
| | | [dR](C)[sP].[dR](A)[sP].[LR](T)[sP].[dR](C)[sP].[LR](A)[sP].[LR](A) | | | |
| 1606 | 1606_9 | [LR](T)[sP].[LR](T)[sP].[dR](T)[sP].[LR]([5meC])[sP].[dR](T)[sP].[dR](T)[sP].[dR](C)[sP]. | 30.4 | | 22.5 |
| | | [LR](A)[sP].[dR](T)[sP].[dR](T)[sP].[dR](A)[sP].[dR](T)[sP].[dR](A)[sP].[dR](C)[sP]. | | | |
| | | [dR](C)[sP].[dR](A)[sP].[dR](T)[sP].[dR](C)[sP].[LR](A)[sP].[LR](A) | | | |
| 1606 | 1606_10 | [LR](T)[sP].[LR](T)[sP].[LR](T)[sP].[dR](C)[sP].[dR](T)[sP].[dR](T)[sP].[dR](C)[sP]. | 34.5 | | 21 |
| | | [LR](A)[sP].[dR](T)[sP].[dR](T)[sP].[LR](A)[sP].[dR](T)[sP].[dR](A)[sP].[dR](C)[sP]. | | | |
| | | [dR](C)[sP].[dR](A)[sP].[dR](T)[sP].[dR](C)[sP].[LR](A)[sP].[LR](A) | | | |
| 1606 | 1606_11 | [LR](T)[sP].[LR](T)[sP].[dR](T)[sP].[dR](C)[sP].[dR](T)[sP].[LR](T)[sP].[dR](C)[sP]. | 35.8 | | 29.2 |
| | | [LR](A)[sP].[dR](T)[sP].[dR](T)[sP].[dR](A)[sP].[dR](T)[sP].[dR](A)[sP].[dR](C)[sP]. | | | |
| | | [LR]([5meC])[sP].[dR](A)[sP].[dR](T)[sP].[dR](C)[sP].[LR](A)[sP].[LR](A) | | | |
| 1606 | 1606_12 | [LR](T)[sP].[LR](T)[sP].[LR](T)[sP].[dR](C)[sP].[dR](T)[sP].[dR](T)[sP].[dR](C)[sP]. | 23.5 | | 18.6 |
| | | [LR](A)[sP].[dR](T)[sP].[dR](T)[sP].[dR](A)[sP].[dR](T)[sP].[dR](A)[sP].[dR](C)[sP]. | | | |
| | | [dR](C)[sP].[LR](A)[sP].[dR](T)[sP].[dR](C)[sP].[LR](A)[sP].[LR](A) | | | |
| 1606 | 1606_13 | [LR](T)[sP].[LR](T)[sP].[dR](T)[sP].[dR](C)[sP].[LR](T)[sP].[dR](T)[sP].[dR](C)[sP]. | 51.3 | | 52 |
| | | [dR](A)[sP].[dR](T)[sP].[dR](T)[sP].[dR](A)[sP].[dR](T)[sP].[dR](A)[sP].[dR](C)[sP]. | | | |
| | | [dR](C)[sP].[dR](A)[sP].[LR](T)[sP].[dR](C)[sP].[LR](A)[sP].[LR](A) | | | |
| 1606 | 1606_14 | [LR](T)[sP].[LR](T)[sP].[dR](T)[sP].[dR](C)[sP].[dR](T)[sP].[dR](T)[sP].[LR]([5meC])[sP]. | 42.9 | | 33.8 |
| | | [dR](A)[sP].[LR](T)[sP].[dR](T)[sP].[dR](A)[sP].[dR](T)[sP].[dR](A)[sP].[dR](C)[sP]. | | | |
| | | [dR](C)[sP].[dR](A)[sP].[dR](T)[sP].[dR](C)[sP].[LR](A)[sP].[LR](A) | | | |
| 1606 | 1606_15 | [LR](T)[sP].[LR](T)[sP].[dR](T)[sP].[dR](C)[sP].[LR](T)[sP].[dR](T)[sP].[LR]([5meC])[sP]. | 34.4 | | 32.2 |
| | | [dR](A)[sP].[dR](T)[sP].[dR](T)[sP].[dR](A)[sP].[dR](T)[sP].[dR](A)[sP].[dR](C)[sP]. | | | |
| | | [dR](C)[sP].[dR](A)[sP].[dR](T)[sP].[dR](C)[sP].[LR](A)[sP].[LR](A) | | | |
| 1606 | 1606_16 | [LR](T)[sP].[LR](T)[sP].[dR](T)[sP].[dR](C)[sP].[dR](T)[sP].[LR](T)[sP].[dR](C)[sP]. | 37.7 | | 34 |
| | | [LR](A)[sP].[dR](T)[sP].[LR](T)[sP].[dR](A)[sP].[dR](T)[sP].[dR](A)[sP].[dR](C)[sP]. | | | |
| | | [dR](C)[sP].[dR](A)[sP].[dR](T)[sP].[dR](C)[sP].[LR](A)[sP].[LR](A) | | | |
| 1606 | 1606_17 | [LR](T)[sP].[LR](T)[sP].[dR](T)[sP].[dR](C)[sP].[LR](T)[sP].[dR](T)[sP].[LR]([5meC])[sP]. | 31.2 | | 26.9 |
| | | [dR](A)[sP].[dR](T)[sP].[dR](T)[sP].[dR](A)[sP].[dR](T)[sP].[dR](A)[sP].[dR](C)[sP]. | | | |
| | | [dR](C)[sP].[LR](A)[sP].[dR](T)[sP].[dR](C)[sP].[LR](A)[sP].[LR](A) | | | |
| 1606 | 1606_18 | [LR](T)[sP].[LR](T)[sP].[dR](T)[sP].[dR](C)[sP].[dR](T)[sP].[dR](T)[sP].[LR]([5meC])[sP]. | 41 | | 36.7 |
| | | [dR](A)[sP].[dR](T)[sP].[dR](T)[sP].[dR](A)[sP].[dR](T)[sP].[dR](A)[sP].[dR](C)[sP]. | | | |
| | | [dR](C)[sP].[dR](A)[sP].[LR](T)[sP].[dR](C)[sP].[LR](A)[sP].[LR](A) | | | |
| 1606 | 1606_19 | [LR](T)[sP].[LR](T)[sP].[LR](T)[sP].[dR](C)[sP].[dR](T)[sP].[LR](T)[sP].[dR](C)[sP]. | 21.9 | | 19.1 |
| | | [dR](A)[sP].[dR](T)[sP].[dR](T)[sP].[dR](A)[sP].[dR](T)[sP].[dR](A)[sP].[dR](C)[sP]. | | | |
| | | [dR](C)[sP].[dR](A)[sP].[dR](T)[sP].[dR](C)[sP].[LR](A)[sP].[LR](A) | | | |
| 1606 | 1606_20 | [LR](T)[sP].[LR](T)[sP].[LR](T)[sP].[dR](C)[sP].[dR](T)[sP].[LR](T)[sP].[dR](C)[sP]. | 20.9 | | 19 |
| | | [LR](A)[sP].[dR](T)[sP].[dR](T)[sP].[dR](A)[sP].[dR](T)[sP].[dR](A)[sP].[dR](C)[sP]. | | | |
| | | [dR](C)[sP].[dR](A)[sP].[dR](T)[sP].[dR](C)[sP].[LR](A)[sP].[LR](A) | | | |
| 1606 | 1606_21 | [LR](T)[sP].[LR](T)[sP].[LR](T)[sP].[dR](C)[sP].[dR](T)[sP].[dR](T)[sP].[dR](C)[sP]. | 38.2 | | 29.7 |
| | | [dR](A)[sP].[LR](T)[sP].[dR](T)[sP].[dR](A)[sP].[dR](T)[sP].[dR](A)[sP].[dR](C)[sP]. | | | |
| | | [dR](C)[sP].[dR](A)[sP].[dR](T)[sP].[dR](C)[sP].[LR](A)[sP].[LR](A) | | | |
| 1606 | 1606_22 | [LR](T)[sP].[LR](T)[sP].[dR](T)[sP].[dR](C)[sP].[LR](T)[sP].[dR](T)[sP].[LR]([5meC])[sP]. | 58.6 | | 42.9 |
| | | [dR](A)[sP].[dR](T)[sP].[dR](T)[sP].[LR](A)[sP].[dR](T)[sP].[dR](A)[sP].[dR](C)[sP]. | | | |
| | | [dR](C)[sP].[dR](A)[sP].[dR](T)[sP].[dR](C)[sP].[LR](A)[sP].[LR](A) | | | |
| 1606 | 1606_23 | [LR](T)[sP].[LR](T)[sP].[dR](T)[sP].[dR](C)[sP].[dR](T)[sP].[LR](T)[sP].[dR](C)[sP]. | 61.3 | | 45.5 |
| | | [LR](A)[sP].[dR](T)[sP].[dR](T)[sP].[dR](A)[sP].[LR](T)[sP].[dR](A)[sP].[dR](C)[sP]. | | | |
| | | [dR](C)[sP].[dR](A)[sP].[dR](T)[sP].[dR](C)[sP].[LR](A)[sP].[LR](A) | | | |
| 1606 | 1606_24 | [LR](T)[sP].[LR](T)[sP].[LR](T)[sP].[dR](C)[sP].[dR](T)[sP].[LR](T)[sP].[dR](C)[sP]. | 21.1 | | 22.8 |
| | | [dR](A)[sP].[dR](T)[sP].[dR](T)[sP].[dR](A)[sP].[dR](T)[sP].[dR](A)[sP].[dR](C)[sP]. | | | |
| | | [dR](C)[sP].[LR](A)[sP].[dR](T)[sP].[dR](C)[sP].[LR](A)[sP].[LR](A) | | | |
| 1606 | 1606_25 | [LR](T)[sP].[LR](T)[sP].[dR](T)[sP].[LR]([5meC])[sP].[dR](T)[sP].[LR](T)[sP].[dR](C)[sP]. | 39.2 | | 25.8 |
| | | [LR](A)[sP].[dR](T)[sP].[dR](T)[sP].[dR](A)[sP].[dR](T)[sP].[dR](A)[sP].[dR](C)[sP]. | | | |
| | | [dR](C)[sP].[dR](A)[sP].[dR](T)[sP].[dR](C)[sP].[LR](A)[sP].[LR](A) | | | |
| 1606 | 1606_26 | [LR](T)[sP].[LR](T)[sP].[dR](T)[sP].[LR]([5meC])[sP].[dR](T)[sP].[dR](T)[sP].[dR](C)[sP]. | 38.6 | | 33.3 |
| | | [dR](A)[sP].[LR](T)[sP].[dR](T)[sP].[dR](A)[sP].[dR](T)[sP].[dR](A)[sP].[dR](C)[sP]. | | | |
| | | [dR](C)[sP].[dR](A)[sP].[dR](T)[sP].[dR](C)[sP].[LR](A)[sP].[LR](A) | | | |
| 1606 | 1606_27 | [LR](T)[sP].[LR](T)[sP].[LR](T)[sP].[dR](C)[sP].[dR](T)[sP].[LR](T)[sP].[dR](C)[sP]. | 37 | | 27.7 |
| | | [dR](A)[sP].[dR](T)[sP].[dR](T)[sP].[LR](A)[sP].[dR](T)[sP].[dR](A)[sP].[dR](C)[sP]. | | | |
| | | [dR](C)[sP].[dR](A)[sP].[dR](T)[sP].[dR](C)[sP].[LR](A)[sP].[LR](A) | | | |
| 1606 | 1606_28 | [LR](T)[sP].[LR](T)[sP].[LR](T)[sP].[dR](C)[sP].[dR](T)[sP].[LR](T)[sP].[dR](C)[sP]. | 43.7 | | 34.8 |
| | | [LR](A)[sP].[dR](T)[sP].[dR](T)[sP].[LR](A)[sP].[dR](T)[sP].[dR](A)[sP].[dR](C)[sP]. | | | |
| | | [dR](C)[sP].[dR](A)[sP].[dR](T)[sP].[dR](C)[sP].[LR](A)[sP].[LR](A) | | | |
| 1606 | 1606_29 | [LR](T)[sP].[LR](T)[sP].[LR](T)[sP].[dR](C)[sP].[dR](T)[sP].[LR](T)[sP].[dR](C)[sP]. | 42.2 | | 29.5 |
| | | [dR](A)[sP].[dR](T)[sP].[dR](T)[sP].[dR](A)[sP].[dR](T)[sP].[LR](A)[sP].[dR](C)[sP]. | | | |
| | | [dR](C)[sP].[dR](A)[sP].[dR](T)[sP].[dR](C)[sP].[LR](A)[sP].[LR](A) | | | |
| 1606 | 1606_30 | [LR](T)[sP].[LR](T)[sP].[LR](T)[sP].[dR](C)[sP].[dR](T)[sP].[LR](T)[sP].[dR](C)[sP]. | 21.9 | | 21.9 |
| | | [LR](A)[sP].[dR](T)[sP].[dR](T)[sP].[dR](A)[sP].[dR](T)[sP].[dR](A)[sP].[dR](C)[sP]. | | | |
| | | [dR](C)[sP].[LR](A)[sP].[dR](T)[sP].[dR](C)[sP].[LR](A)[sP].[LR](A) | | | |
| 1606 | 1606_31 | [LR](T)[sP].[LR](T)[sP].[LR](T)[sP].[dR](C)[sP].[dR](T)[sP].[dR](T)[sP].[dR](C)[sP]. | 30.2 | | 27.2 |
| | | [dR](A)[sP].[dR](T)[sP].[dR](T)[sP].[dR](A)[sP].[dR](T)[sP].[dR](A)[sP].[dR](C)[sP]. | | | |
| | | [dR](C)[sP].[dR](A)[sP].[LR](T)[sP].[dR](C)[sP].[LR](A)[sP].[LR](A) | | | |
| 1606 | 1606_32 | [LR](T)[sP].[LR](T)[sP].[LR](T)[sP].[dR](C)[sP].[dR](T)[sP].[dR](T)[sP].[dR](C)[sP]. | 19.3 | | 16.8 |
| | | [LR](A)[sP].[dR](T)[sP].[dR](T)[sP].[dR](A)[sP].[dR](T)[sP].[dR](A)[sP].[dR](C)[sP]. | | | |
| | | [dR](C)[sP].[dR](A)[sP].[LR](T)[sP].[dR](C)[sP].[LR](A)[sP].[LR](A) | | | |
| 1606 | 1606_33 | [LR](T)[sP].[LR](T)[sP].[LR](T)[sP].[dR](C)[sP].[LR](T)[sP].[dR](T)[sP].[dR](C)[sP]. | 26.3 | | 24.5 |
| | | [LR](A)[sP].[dR](T)[sP].[dR](T)[sP].[dR](A)[sP].[dR](T)[sP].[dR](A)[sP].[dR](C)[sP]. | | | |
| | | [dR](C)[sP].[dR](A)[sP].[dR](T)[sP].[dR](C)[sP].[LR](A)[sP].[LR](A) | | | |
| 1606 | 1606_34 | [LR](T)[sP].[LR](T)[sP].[dR](T)[sP].[dR](C)[sP].[LR](T)[sP].[LR](T)[sP].[dR](C)[sP]. | 26.8 | | 21.9 |
| | | [LR](A)[sP].[dR](T)[sP].[dR](T)[sP].[dR](A)[sP].[dR](T)[sP].[dR](A)[sP].[dR](C)[sP]. | | | |
| | | [dR](C)[sP].[dR](A)[sP].[dR](T)[sP].[dR](C)[sP].[LR](A)[sP].[LR](A) | | | |
| 1606 | 1606_35 | [LR](T)[sP].[LR](T)[sP].[LR](T)[sP].[dR](C)[sP].[dR](T)[sP].[dR](T)[sP].[dR](C)[sP]. | 23.7 | | 17 |
| | | [LR](A)[sP].[dR](T)[sP].[dR](T)[sP].[dR](A)[sP].[dR](T)[sP].[dR](A)[sP].[dR](C)[sP]. | | | |
| | | [LR]([5meC])[sP].[dR](A)[sP].[dR](T)[sP].[dR](C)[sP].[LR](A)[sP].[LR](A) | | | |
| 1606 | 1606_36 | [LR](T)[sP].[LR](T)[sP].[LR](T)[sP].[dR](C)[sP].[dR](T)[sP].[dR](T)[sP].[LR]([5meC])[sP]. | 14.9 | | 14.5 |
| | | [dR](A)[sP].[dR](T)[sP].[dR](T)[sP].[dR](A)[sP].[dR](T)[sP].[dR](A)[sP].[dR](C)[sP]. | | | |
| | | [dR](C)[sP].[dR](A)[sP].[dR](T)[sP].[dR](C)[sP].[LR](A)[sP].[LR](A) | | | |
| 1606 | 1606_37 | [LR](T)[sP].[LR](T)[sP].[dR](T)[sP].[LR]([5meC])[sP].[dR](T)[sP].[dR](T)[sP]. | 17.2 | | 17.7 |
| | | [LR]([5meC])[sP].[dR](A)[sP].[dR](T)[sP].[dR](T)[sP].[dR](A)[sP].[dR](T)[sP].[dR](A)[sP]. | | | |
| | | [dR](C)[sP].[dR](C)[sP].[dR](A)[sP].[dR](T)[sP].[dR](C)[sP].[LR](A)[sP].[LR](A) | | | |
| 1606 | 1606_38 | [LR](T)[sP].[LR](T)[sP].[dR](T)[sP].[dR](C)[sP].[LR](T)[sP].[dR](T)[sP].[LR]([5meC])[sP]. | 33.4 | | 31.1 |
| | | [dR](A)[sP].[LR](T)[sP].[dR](T)[sP].[dR](A)[sP].[dR](T)[sP].[dR](A)[sP].[dR](C)[sP]. | | | |
| | | [dR](C)[sP].[dR](A)[sP].[dR](T)[sP].[dR](C)[sP].[LR](A)[sP].[LR](A) | | | |
| 1606 | 1606_39 | [LR](T)[sP].[LR](T)[sP].[LR](T)[sP].[dR](C)[sP].[dR](T)[sP].[dR](T)[sP].[LR]([5meC])[sP]. | 28.6 | | 24.5 |
| | | [dR](A)[sP].[dR](T)[sP].[dR](T)[sP].[LR](A)[sP].[dR](T)[sP].[dR](A)[sP].[dR](C)[sP]. | | | |
| | | [dR](C)[sP].[dR](A)[sP].[dR](T)[sP].[dR](C)[sP].[LR](A)[sP].[LR](A) | | | |
| 1606 | 1606_40 | [LR](T)[sP].[LR](T)[sP].[LR](T)[sP].[dR](C)[sP].[dR](T)[sP].[dR](T)[sP].[LR]([5meC])[sP]. | 18.5 | | 16.2 |
| | | [dR](A)[sP].[dR](T)[sP].[dR](T)[sP].[dR](A)[sP].[dR](T)[sP].[dR](A)[sP].[dR](C)[sP]. | | | |
| | | [dR](C)[sP].[LR](A)[sP].[dR](T)[sP].[dR](C)[sP].[LR](A)[sP].[LR](A) | | | |
| 1606 | 1606_41 | [LR](T)[sP].[LR](T)[sP].[dR](T)[sP].[dR](C)[sP].[dR](T)[sP].[LR](T)[sP].[dR](C)[sP]. | 38.2 | | 25.2 |
| | | [LR](A)[sP].[LR](T)[sP].[dR](T)[sP].[dR](A)[sP].[dR](T)[sP].[dR](A)[sP].[dR](C)[sP]. | | | |
| | | [dR](C)[sP].[dR](A)[sP].[dR](T)[sP].[dR](C)[sP].[LR](A)[sP].[LR](A) | | | |
| 1606 | 1606_42 | [LR](T)[sP].[LR](T)[sP].[LR](T)[sP].[dR](C)[sP].[dR](T)[sP].[dR](T)[sP].[dR](C)[sP]. | 24.5 | | 19.2 |
| | | [LR](A)[sP].[dR](T)[sP].[LR](T)[sP].[dR](A)[sP].[dR](T)[sP].[dR](A)[sP].[dR](C)[sP]. | | | |
| | | [dR](C)[sP].[dR](A)[sP].[dR](T)[sP].[dR](C)[sP].[LR](A)[sP].[LR](A) | | | |
| 1606 | 1606_43 | [LR](T)[sP].[LR](T)[sP].[LR](T)[sP].[dR](C)[sP].[dR](T)[sP].[LR](T)[sP].[dR](C)[sP]. | 36.4 | | 30 |
| | | [dR](A)[sP].[LR](T)[sP].[dR](T)[sP].[dR](A)[sP].[dR](T)[sP].[dR](A)[sP].[dR](C)[sP]. | | | |
| | | [dR](C)[sP].[LR](A)[sP].[dR](T)[sP].[dR](C)[sP].[LR](A)[sP].[LR](A) | | | |
| 1606 | 1606_44 | [LR](T)[sP].[LR](T)[sP].[dR](T)[sP].[dR](C)[sP].[LR](T)[sP].[dR](T)[sP].[LR]([5meC])[sP]. | 25.3 | | 25 |
| | | [dR](A)[sP].[dR](T)[sP].[dR](T)[sP].[dR](A)[sP].[dR](T)[sP].[dR](A)[sP].[dR](C)[sP]. | | | |
| | | [dR](C)[sP].[dR](A)[sP].[LR](T)[sP].[dR](C)[sP].[LR](A)[sP].[LR](A) | | | |
| 1606 | 1606_45 | [LR](T)[sP].[LR](T)[sP].[LR](T)[sP].[dR](C)[sP].[dR](T)[sP].[LR](T)[sP].[dR](C)[sP]. | 33.4 | | 29.4 |
| | | [LR](A)[sP].[dR](T)[sP].[mR](U)[sP].[dR](A)[sP].[dR](T)[sP].[dR](A)[sP].[dR](C)[sP]. | | | |
| | | [dR](C)[sP].[dR](A)[sP].[dR](T)[sP].[LR]([5meC])[sP].[LR](A)[sP].[LR](A) | | | |
| 1606 | 1606_46 | [LR](T)[sP].[LR](T)[sP].[LR](T)[sP].[dR](C)[sP].[dR](T)[sP].[LR](T)[sP].[dR](C)[sP]. | 18.7 | | 24 |
| | | [LR](A)[sP].[mR](U)[sP].[dR](T)[sP].[dR](A)[sP].[dR](T)[sP].[dR](A)[sP].[dR](C)[sP]. | | | |
| | | [dR](C)[sP].[dR](A)[sP].[dR](T)[sP].[LR]([5meC])[sP].[LR](A)[sP].[LR](A) | | | |
| 1606 | 1606_47 | [LR](T)[sP].[LR](T)[sP].[LR](T)[sP].[dR](C)[sP].[dR](T)[sP].[LR](T)[sP].[dR](C)[sP]. | 39.3 | | 36.4 |
| | | [LR](A)[sP].[dR](T)[sP].[dR](T)[sP].[mR](A)[sP].[dR](T)[sP].[dR](A)[sP].[dR](C)[sP]. | | | |
| | | [dR](C)[sP].[dR](A)[sP].[dR](T)[sP].[LR]([5meC])[sP].[LR](A)[sP].[LR](A) | | | |
| 1608 | 1608_2 | [LR](A)[sP].[LR](T)[sP].[dR](A)[sP].[dR](T)[sP].[dR](T)[sP].[dR](T)[sP].[dR](T)[sP]. | | 64.1 | 56.6 |
| | | [dR](C)[sP].[LR](T)[sP].[dR](T)[sP].[dR](C)[sP].[LR](A)[sP].[LR](T)[sP].[LR](T)[sP]. | | | |
| | | [dR](A)[sP].[dR](T)[sP].[dR](A)[sP].[LR]([5meC])[sP].[dR](C)[sP].[LR](A)[sP].[LR](T) | | | |
| 1608 | 1608_3 | [LR](A)[sP].[LR](T)[sP].[dR](A)[sP].[dR](T)[sP].[LR](T)[sP].[dR](T)[sP].[LR](T)[sP]. | | 37.4 | 42 |
| | | [dR](C)[sP].[LR](T)[sP].[dR](T)[sP].[LR]([5meC])[sP].[LR](A)[sP].[dR](T)[sP].[dR](T)[sP]. | | | |
| | | [dR](A)[sP].[dR](T)[sP].[dR](A)[sP].[dR](C)[sP].[dR](C)[sP].[LR](A)[sP].[LR](T) | | | |
| 1608 | 1608_4 | [LR](A)[sP].[LR](T)[sP].[LR](A)[sP].[dR](T)[sP].[dR](T)[sP].[dR](T)[sP].[dR](T)[sP]. | | 39.6 | 37.3 |
| | | [dR](C)[sP].[LR](T)[sP].[LR](T)[sP].[dR](C)[sP].[LR](A)[sP].[dR](T)[sP].[dR](T)[sP]. | | | |
| | | [dR](A)[sP].[dR](T)[sP].[dR](A)[sP].[dR](C)[sP].[dR](C)[sP].[LR](A)[sP].[LR](T) | | | |
| 1611 | 1611_2 | [LR](A)[sP].[LR](A)[sP].[dR](A)[sP].[dR](T)[sP].[LR](A)[sP].[LR](T)[sP].[LR](T)[sP]. | | 90.2 | 81.1 |
| | | [LR](T)[sP].[dR](T)[sP].[LR]([5meC])[sP].[dR](T)[sP].[dR](T)[sP].[dR](C)[sP].[dR](A)[sP]. | | | |
| | | [dR](T)[sP].[dR](T)[sP].[LR](A)[sP].[dR](T)[sP].[dR](A)[sP].[LR]([5meC])[sP].[LR]([5meC]) | | | |
| 1611 | 1611_3 | [LR](A)[sP].[LR](A)[sP].[dR](A)[sP].[LR](T)[sP].[dR](A)[sP].[dR](T)[sP].[LR](T)[sP]. | | 94.3 | 84 |
| | | [dR](T)[sP].[dR](T)[sP].[dR](C)[sP].[dR](T)[sP].[dR](T)[sP].[dR](C)[sP].[LR](A)[sP]. | | | |
| | | [dR](T)[sP].[LR](T)[sP].[dR](A)[sP].[LR](T)[sP].[dR](A)[sP].[LR]([5meC])[sP].[LR]([5meC]) | | | |
| 1611 | 1611_4 | [LR](A)[sP].[LR](A)[sP].[LR](A)[sP].[dR](T)[sP].[dR](A)[sP].[dR](T)[sP].[dR](T)[sP]. | | 25.4 | 37.4 |
| | | [LR](T)[sP].[LR](T)[sP].[dR](C)[sP].[LR](T)[sP].[dR](T)[sP].[dR](C)[sP].[dR](A)[sP]. | | | |
| | | [dR](T)[sP].[dR](T)[sP].[dR](A)[sP].[dR](T)[sP].[LR](A)[sP].[LR]([5meC])[sP].[LR]([5meC]) | | | |
| 1611 | 1611_5 | [LR](A)[sP].[LR](A)[sP].[LR](A)[sP].[LR](T)[sP].[dR](A)[sP].[dR](T)[sP].[dR](T)[sP]. | | 48.6 | 34.1 |
| | | [dR](T)[sP].[dR](T)[sP].[dR](C)[sP].[dR](T)[sP].[dR](T)[sP].[LR]([5meC])[sP].[dR](A)[sP]. | | | |
| | | [dR](T)[sP].[LR](T)[sP].[dR](A)[sP].[dR](T)[sP].[LR](A)[sP].[LR]([5meC])[sP].[LR]([5meC]) | | | |
| 1611 | 1611_6 | [LR](A)[sP].[LR](A)[sP].[dR](A)[sP].[dR](T)[sP].[LR](A)[sP].[dR](T)[sP].[dR](T)[sP]. | | 37.3 | 35.5 |
| | | [dR](T)[sP].[dR](T)[sP].[LR]([5meC])[sP].[dR](T)[sP].[dR](T)[sP].[dR](C)[sP].[dR](A)[sP]. | | | |
| | | [dR](T)[sP].[dR](T)[sP].[dR](A)[sP].[dR](T)[sP].[LR](A)[sP].[LR]([5meC])[sP].[LR]([5meC]) | | | |
| 1612 | 1612_2 | [LR](A)[sP].[LR](T)[sP].[dR](A)[sP].[dR](T)[sP].[dR](T)[sP].[dR](T)[sP].[LR](T)[sP]. | | 38.5 | 34.7 |
| | | [dR](C)[sP].[dR](T)[sP].[dR](T)[sP].[dR](C)[sP].[dR](A)[sP].[dR](T)[sP].[dR](T)[sP]. | | | |
| | | [dR](A)[sP].[LR](T)[sP].[dR](A)[sP].[LR]([5meC])[sP].[LR]([5meC]) | | | |
| 1612 | 1612_3 | [LR](A)[sP].[LR](T)[sP].[LR](A)[sP].[LR](T)[sP].[dR](T)[sP].[LR](T)[sP].[dR](T)[sP]. | | 72 | 62.1 |
| | | [dR](C)[sP].[LR](T)[sP].[dR](T)[sP].[dR](C)[sP].[dR](A)[sP].[dR](T)[sP].[dR](T)[sP]. | | | |
| | | [dR](A)[sP].[dR](T)[sP].[LR](A)[sP].[LR]([5meC])[sP].[LR]([5meC]) | | | |
| 1613 | 1613_2 | [LR](A)[sP].[LR](A)[sP].[dR](T)[sP].[LR](A)[sP].[LR](T)[sP].[dR](T)[sP].[dR](T)[sP]. | | 72.1 | 58 |
| | | [dR](T)[sP].[dR](C)[sP].[LR](T)[sP].[LR](T)[sP].[dR](C)[sP].[dR](A)[sP].[dR](T)[sP]. | | | |
| | | [dR](T)[sP].[dR](A)[sP].[dR](T)[sP].[dR](A)[sP].[LR]([5meC])[sP].[LR]([5meC]) | | | |
| 1613 | 1613_3 | [LR](A)[sP].[LR](A)[sP].[dR](T)[sP].[dR](A)[sP].[dR](T)[sP].[dR](T)[sP].[dR](T)[sP]. | | 49.4 | 51.9 |
| | | [dR](T)[sP].[dR](C)[sP].[LR](T)[sP].[dR](T)[sP].[LR]([5meC])[sP].[LR](A)[sP].[LR](T)[sP]. | | | |
| | | [dR](T)[sP].[dR](A)[sP].[dR](T)[sP].[LR](A)[sP].[LR]([5meC])[sP].[LR]([5meC]) | | | |
| 1613 | 1613_4 | [LR](A)[sP].[LR](A)[sP].[dR](T)[sP].[LR](A)[sP].[dR](T)[sP].[LR](T)[sP].[dR](T)[sP]. | | 77.9 | 71.4 |
| | | [dR](T)[sP].[dR](C)[sP].[dR](T)[sP].[dR](T)[sP].[dR](C)[sP].[dR](A)[sP].[LR](T)[sP]. | | | |
| | | [LR](T)[sP].[LR](A)[sP].[dR](T)[sP].[dR](A)[sP].[LR]([5meC])[sP].[LR]([5meC]) | | | |
| 1618 | 1618_2 | [LR](A)[sP].[LR](G)[sP].[dR](A)[sP].[dR](A)[sP].[dR](T)[sP].[dR](T)[sP].[dR](T)[sP]. | | 68.2 | 69.6 |
| | | [dR](T)[sP].[LR]([5meC])[sP].[dR](C)[sP].[LR](T)[sP].[dR](T)[sP].[dR](C)[sP].[dR](A)[sP]. | | | |
| | | [dR](T)[sP].[dR](C)[sP].[LR](T)[sP].[LR](A) | | | |
| 1620 | 1620_2 | [LR](T)[sP].[LR]([5meC])[sP].[dR](A)[sP].[dR](G)[sP].[dR](A)[sP].[dR](A)[sP].[dR](T)[sP]. | | 62.4 | 65.8 |
| | | [dR](T)[sP].[dR](T)[sP].[dR](T)[sP].[dR](C)[sP].[dR](C)[sP].[LR](T)[sP].[dR](T)[sP]. | | | |
| | | [LR]([5meC])[sP].[dR](A)[sP].[LR](T)[sP].[LR]([5meC]) | | | |
| 1625 | 1625_3 | [LR](T)[sP].[LR](T)[sP].[dR](G)[sP].[dR](T)[sP].[dR](T)[sP].[dR](A)[sP].[dR](C)[sP]. | | 78.1 | 81.7 |
| | | [dR](A)[sP].[dR](A)[sP].[LR](A)[sP].[dR](A)[sP].[LR](T)[sP].[LR](A)[sP].[dR](A)[sP]. | | | |
| | | [LR](T)[sP].[LR]([5meC])[sP].[LR]([5meC])[sP].[LR](A) | | | |
| 1625 | 1625_4 | [LR](T)[sP].[LR](T)[sP].[dR](G)[sP].[dR](T)[sP].[LR](T)[sP].[dR](A)[sP].[LR]([5meC])[sP]. | | 86 | 77.9 |
| | | [LR](A)[sP].[dR](A)[sP].[dR](A)[sP].[dR](A)[sP].[dR](T)[sP].[dR](A)[sP].[dR](A)[sP]. | | | |
| | | [LR](T)[sP].[LR]([5meC])[sP].[LR]([5meC])[sP].[LR](A) | | | |
| 1639 | 1639_2 | [LR](A)[sP].[LR](G)[sP].[LR](T)[sP].[LR](T)[sP].[dR](T)[sP].[LR]([5meC])[sP].[dR](A)[sP]. | | 100 | 93.4 |
| | | [LR](T)[sP].[dR](A)[sP].[dR](T)[sP].[dR](T)[sP].[dR](T)[sP].[dR](T)[sP].[dR](T)[sP]. | | | |
| | | [dR](A)[sP].[LR](A)[sP].[LR](T)[sP].[LR]([5meC]) | | | |
| 1641 | 1641_2 | [LR](A)[sP].[LR](A)[sP].[dR](G)[sP].[dR](C)[sP].[dR](T)[sP].[dR](C)[sP].[dR](T)[sP]. | | 71.6 | 69.7 |
| | | [dR](T)[sP].[LR](T)[sP].[LR]([5meC])[sP].[dR](C)[sP].[LR](A)[sP].[dR](A)[sP].[dR](A)[sP]. | | | |
| | | [dR](T)[sP].[dR](T)[sP].[LR]([5meC])[sP].[LR](T) | | | |
| 1641 | 1641_3 | [LR](A)[sP].[LR](A)[sP].[dR](G)[sP].[dR](C)[sP].[dR](T)[sP].[dR](C)[sP].[dR](T)[sP]. | | 80.9 | 73.4 |
| | | [dR](T)[sP].[dR](T)[sP].[dR](C)[sP].[LR]([5meC])[sP].[dR](A)[sP].[dR](A)[sP].[LR](A)[sP]. | | | |
| | | [dR](T)[sP].[LR](T)[sP].[LR]([5meC])[sP].[LR](T) | | | |
| 1641 | 1641_4 | [LR](A)[sP].[LR](A)[sP].[dR](G)[sP].[LR]([5meC])[sP].[dR](T)[sP].[dR](C)[sP].[dR](T)[sP]. | | 99 | 85.5 |
| | | [dR](T)[sP].[dR](T)[sP].[dR](C)[sP].[LR]([5meC])[sP].[dR](A)[sP].[dR](A)[sP].[LR](A)[sP]. | | | |
| | | [dR](T)[sP].[dR](T)[sP].[LR]([5meC])[sP].[LR](T) | | | |
| 1641 | 1641_5 | [LR](A)[sP].[LR](A)[sP].[dR](G)[sP].[LR]([5meC])[sP].[dR](T)[sP].[dR](C)[sP].[dR](T)[sP]. | | 89.8 | 75.9 |
| | | [dR](T)[sP].[dR](T)[sP].[LR]([5meC])[sP].[dR](C)[sP].[dR](A)[sP].[dR](A)[sP].[dR](A)[sP]. | | | |
| | | [dR](T)[sP].[dR](T)[sP].[LR]([5meC])[sP].[LR](T) | | | |
| 1641 | 1641_6 | [LR](A)[sP].[LR](A)[sP].[dR](G)[sP].[dR](C)[sP].[dR](T)[sP].[LR]([5meC])[sP].[dR](T)[sP]. | | 64.6 | 65.2 |
| | | [dR](T)[sP].[dR](T)[sP].[dR](C)[sP].[dR](C)[sP].[dR](A)[sP].[dR](A)[sP].[LR](A)[sP]. | | | |
| | | [dR](T)[sP].[dR](T)[sP].[LR]([5meC])[sP].[LR](T) | | | |
| 1641 | 1641_7 | [LR](A)[sP].[LR](A)[sP].[dR](G)[sP].[dR](C)[sP].[dR](T)[sP].[dR](C)[sP].[dR](T)[sP]. | | 83.6 | 76.5 |
| | | [dR](T)[sP].[dR](T)[sP].[dR](C)[sP].[LR]([5meC])[sP].[dR](A)[sP].[dR](A)[sP].[dR](A)[sP]. | | | |
| | | [dR](T)[sP].[LR](T)[sP].[LR]([5meC])[sP].[LR](T) | | | |
| 1641 | 1641_8 | [LR](A)[sP].[LR](A)[sP].[dR](G)[sP].[dR](C)[sP].[dR](T)[sP].[dR](C)[sP].[LR](T)[sP]. | | 73.2 | 81.9 |
| | | [LR](T)[sP].[dR](T)[sP].[LR]([5meC])[sP].[dR](C)[sP].[dR](A)[sP].[dR](A)[sP].[dR](A)[sP]. | | | |
| | | [dR](T)[sP].[dR](T)[sP].[LR]([5meC])[sP].[LR](T) | | | |
| 1641 | 1641_9 | [LR](A)[sP].[LR](A)[sP].[dR](G)[sP].[LR]([5meC])[sP].[dR](T)[sP].[dR](C)[sP].[dR](T)[sP]. | | 89.9 | 75.8 |
| | | [dR](T)[sP].[dR](T)[sP].[dR](C)[sP].[dR](C)[sP].[LR](A)[sP].[dR](A)[sP].[dR](A)[sP]. | | | |
| | | [dR](T)[sP].[dR](T)[sP].[LR]([5meC])[sP].[LR](T) | | | |
| 1641 | 1641_10 | [LR](A)[sP].[LR](A)[sP].[dR](G)[sP].[LR]([5meC])[sP].[dR](T)[sP].[dR](C)[sP].[dR](T)[sP]. | | 98.7 | 85.2 |
| | | [dR](T)[sP].[dR](T)[sP].[dR](C)[sP].[LR]([5meC])[sP].[dR](A)[sP].[dR](A)[sP].[dR](A)[sP]. | | | |
| | | [dR](T)[sP].[dR](T)[sP].[LR]([5meC])[sP].[LR](T) | | | |
| 1641 | 1641_11 | [LR](A)[sP].[LR](A)[sP].[dR](G)[sP].[dR](C)[sP].[dR](T)[sP].[dR](C)[sP].[dR](T)[sP]. | | 82.4 | 79.5 |
| | | [dR](T)[sP].[dR](T)[sP].[LR]([5meC])[sP].[dR](C)[sP].[LR](A)[sP].[dR](A)[sP].[dR](A)[sP]. | | | |
| | | [dR](T)[sP].[dR](T)[sP].[LR]([5meC])[sP].[LR](T) | | | |
| 1641 | 1641_2 | [LR](A)[sP].[LR](A)[sP].[dR](G)[sP].[dR](C)[sP].[dR](T)[sP].[dR](C)[sP].[dR](T)[sP]. | | 80.7 | 73.8 |
| | | [dR](T)[sP].[LR](T)[sP].[LR]([5meC])[sP].[dR](C)[sP].[dR](A)[sP].[dR](A)[sP].[dR](A)[sP]. | | | |
| | | [dR](T)[sP].[dR](T)[sP].[LR]([5meC])[sP].[LR](T) | | | |
| 1740 | 1740_2 | [LR]([5meC])[sP].[LR](T)[sP].[LR]([5meC])[sP].[dR](A)[sP].[dR](A)[sP].[dR](C)[sP]. | | 40.3 | 51.7 |
| | | [LR](T)[sP].[dR](T)[sP].[LR]([5meC])[sP].[dR](T)[sP].[dR](A)[sP].[dR](C)[sP].[dR](T)[sP]. | | | |
| | | [dR](A)[sP].[dR](C)[sP].[dR](T)[sP].[dR](A)[sP].[LR](A)[sP].[LR](T)[sP].[LR](T) | | | |
| 1740 | 1740_3 | [LR]([5meC])[sP].[LR](T)[sP].[LR]([5meC])[sP].[dR](A)[sP].[dR](A)[sP].[dR](C)[sP]. | | 79.4 | 70 |
| | | [dR](T)[sP].[dR](T)[sP].[dR](C)[sP].[dR](T)[sP].[LR](A)[sP].[dR](C)[sP].[dR](T)[sP]. | | | |
| | | [dR](A)[sP].[LR]([5meC])[sP].[dR](T)[sP].[LR](A)[sP].[dR](A)[sP].[LR](T)[sP].[LR](T) | | | |
| 1740 | 1740_4 | [LR]([5meC])[sP].[LR](T)[sP].[LR]([5meC])[sP].[LR](A)[sP].[dR](A)[sP].[dR](C)[sP]. | | 58.7 | 53.9 |
| | | [dR](T)[sP].[dR](T)[sP].[dR](C)[sP].[dR](T)[sP].[dR](A)[sP].[dR](C)[sP].[dR](T)[sP]. | | | |
| | | [dR](A)[sP].[dR](C)[sP].[dR](T)[sP].[LR](A)[sP].[LR](A)[sP].[LR](T)[sP].[LR](T) | | | |
| 1741 | 1741_2 | [LR](T)[sP].[LR]([5meC])[sP].[dR](T)[sP].[dR](C)[sP].[dR](A)[sP].[dR](A)[sP].[dR](C)[sP]. | | 87.3 | 78.6 |
| | | [dR](T)[sP].[dR](T)[sP].[dR](C)[sP].[dR](T)[sP].[dR](A)[sP].[dR](C)[sP].[LR](T)[sP]. | | | |
| | | [LR](A)[sP].[dR](C)[sP].[LR](T)[sP].[dR](A)[sP].[dR](A)[sP].[LR](T)[sP].[LR](T) | | | |
| 1743 | 1743_2 | [LR]([5meC])[sP].[LR](T)[sP].[LR]([5meC])[sP].[dR](A)[sP].[LR](A)[sP].[LR]([5meC])[sP]. | | 44.6 | 57.1 |
| | | [dR](T)[sP].[dR](T)[sP].[dR](C)[sP].[dR](T)[sP].[dR](A)[sP].[dR](C)[sP].[dR](T)[sP]. | | | |
| | | [dR](A)[sP].[LR]([5meC])[sP].[dR](T)[sP].[LR](A)[sP].[LR](A)[sP].[LR](T) | | | |
| 1743 | 1743_3 | [LR]([5meC])[sP].[LR](T)[sP].[LR]([5meC])[sP].[dR](A)[sP].[dR](A)[sP].[dR](C)[sP]. | | 60.7 | 60.5 |
| | | [dR](T)[sP].[dR](T)[sP].[dR](C)[sP].[dR](T)[sP].[dR](A)[sP].[dR](C)[sP].[dR](T)[sP]. | | | |
| | | [LR](A)[sP].[dR](C)[sP].[LR](T)[sP].[LR](A)[sP].[LR](A)[sP].[LR](T) | | | |
| 1743 | 1743_4 | [LR]([5meC])[sP].[LR](T)[sP].[LR]([5meC])[sP].[LR](A)[sP].[dR](A)[sP].[dR](C)[sP]. | | 79.9 | 84.8 |
| | | [dR](T)[sP].[dR](T)[sP].[dR](C)[sP].[dR](T)[sP].[LR](A)[sP].[dR](C)[sP].[dR](T)[sP]. | | | |
| | | [dR](A)[sP].[LR]([5meC])[sP].[dR](T)[sP].[LR](A)[sP].[LR](A)[sP].[LR](T) | | | |
| 1744 | 1744_2 | [LR](T)[sP].[LR]([5meC])[sP].[dR](T)[sP].[LR]([5meC])[sP].[dR](A)[sP].[dR](A)[sP]. | | 68.2 | 61.3 |
| | | [dR](C)[sP].[dR](T)[sP].[dR](T)[sP].[dR](C)[sP].[dR](T)[sP].[dR](A)[sP].[dR](C)[sP]. | | | |
| | | [LR](T)[sP].[dR](A)[sP].[dR](C)[sP].[dR](T)[sP].[dR](A)[sP].[LR](A)[sP].[LR](T) | | | |
| 1744 | 1744_3 | [LR](T)[sP].[LR]([5meC])[sP].[dR](T)[sP].[dR](C)[sP].[dR](A)[sP].[LR](A)[sP]. | | 76 | 71 |
| | | [LR]([5meC])[sP].[dR](T)[sP].[dR](T)[sP].[dR](C)[sP].[dR](T)[sP].[dR](A)[sP].[dR](C)[sP]. | | | |
| | | [dR](T)[sP].[dR](A)[sP].[LR]([5meC])[sP].[dR](T)[sP].[LR](A)[sP].[LR](A)[sP].[LR](T) | | | |
| 1744 | 1744_4 | [LR](T)[sP].[LR]([5meC])[sP].[dR](T)[sP].[dR](C)[sP].[dR](A)[sP].[dR](A)[sP].[dR](C)[sP]. | | 83.8 | 79.2 |
| | | [LR](T)[sP].[dR](T)[sP].[dR](C)[sP].[dR](T)[sP].[dR](A)[sP].[dR](C)[sP].[dR](T)[sP]. | | | |
| | | [dR](A)[sP].[LR]([5meC])[sP].[LR](T)[sP].[dR](A)[sP].[LR](A)[sP].[LR](T) | | | |
| 1744 | 1744_5 | [LR](T)[sP].[LR]([5meC])[sP].[dR](T)[sP].[dR](C)[sP].[dR](A)[sP].[dR](A)[sP].[dR](C)[sP]. | | 87.9 | 83.8 |
| | | [dR](T)[sP].[dR](T)[sP].[dR](C)[sP].[dR](T)[sP].[LR](A)[sP].[dR](C)[sP].[LR](T)[sP]. | | | |
| | | [dR](A)[sP].[LR]([5meC])[sP].[dR](T)[sP].[LR](A)[sP].[LR](A)[sP].[LR](T) | | | |
| 1746 | 1746_2 | [LR]([5meC])[sP].[LR](T)[sP].[LR]([5meC])[sP].[dR](A)[sP].[LR](A)[sP].[LR]([5meC])[sP]. | | 62.2 | 70.5 |
| | | [LR](T)[sP].[dR](T)[sP].[dR](C)[sP].[dR](T)[sP].[dR](A)[sP].[dR](C)[sP].[dR](T)[sP]. | | | |
| | | [dR](A)[sP].[dR](C)[sP].[LR](T)[sP].[LR](A)[sP].[LR](A) | | | |
| 1758 | 1758_2 | [LR](T)[sP].[LR](T)[sP].[dR](T)[sP].[dR](C)[sP].[dR](T)[sP].[dR](C)[sP].[dR](T)[sP]. | | 66.1 | 61 |
| | | [LR]([5meC])[sP].[LR](A)[sP].[LR](A)[sP].[dR](C)[sP].[LR](T)[sP].[dR](T)[sP]. | | | |
| | | [dR](C)[sP].[dR](T)[sP].[dR](A)[sP].[dR](C)[sP].[dR](T)[sP].[LR](A)[sP].[LR]([5meC]) | | | |
| 1759 | 1759_2 | [LR]([5meC])[sP].[LR](T)[sP].[LR]([5meC])[sP].[dR](T)[sP].[dR](C)[sP].[LR](A)[sP]. | | 74.4 | 77.7 |
| | | [LR](A)[sP].[dR](C)[sP].[dR](T)[sP].[dR](T)[sP].[dR](C)[sP].[dR](T)[sP].[dR](A)[sP]. | | | |
| | | [dR](C)[sP].[LR](T)[sP].[LR](A)[sP].[LR]([5meC]) | | | |
| 1762 | 1762_2 | [LR](T)[sP].[LR]([5meC])[sP].[dR](T)[sP].[LR]([5meC])[sP].[dR](T)[sP].[dR](C)[sP]. | | 71.9 | 65.3 |
| | | [LR](A)[sP].[LR](A)[sP].[dR](C)[sP].[LR](T)[sP].[dR](T)[sP].[dR](C)[sP].[dR](T)[sP]. | | | |
| | | [dR](A)[sP].[dR](C)[sP].[dR](T)[sP].[LR](A)[sP].[LR]([5meC]) | | | |
| 1766 | 1766_2 | [LR](T)[sP].[LR]([5meC])[sP].[dR](T)[sP].[LR]([5meC])[sP].[dR](T)[sP].[dR](C)[sP]. | | 89.3 | 79.7 |
| | | [LR](A)[sP].[LR](A)[sP].[dR](C)[sP].[dR](T)[sP].[dR](T)[sP].[dR](C)[sP].[dR](T)[sP]. | | | |
| | | [dR](A)[sP].[dR](C)[sP].[LR](T)[sP].[LR](A) | | | |
| 1768 | 1768_2 | [LR](T)[sP].[LR](T)[sP].[dR](T)[sP].[dR](C)[sP].[dR](T)[sP].[LR]([5meC])[sP].[dR](T)[sP]. | | 80.2 | 76.8 |
| | | [dR](C)[sP].[LR](A)[sP].[dR](A)[sP].[dR](C)[sP].[dR](T)[sP].[dR](T)[sP].[dR](C)[sP]. | | | |
| | | [dR](T)[sP].[dR](A)[sP].[LR]([5meC])[sP].[LR](T) | | | |
| 1769 | 1769_2 | [LR](T)[sP].[LR](T)[sP].[dR](T)[sP].[dR](T)[sP].[LR]([5meC])[sP].[dR](T)[sP].[dR](C)[sP]. | | 74.7 | 69 |
| | | [dR](T)[sP].[dR](C)[sP].[LR](A)[sP].[dR](A)[sP].[dR](C)[sP].[dR](T)[sP].[dR](T)[sP]. | | | |
| | | [dR](C)[sP].[dR](T)[sP].[dR](A)[sP].[LR]([5meC])[sP].[LR](T) | | | |
| 1785 | 1785_2 | [LR](T)[sP].[LR](T)[sP].[dR](A)[sP].[LR]([5meC])[sP].[dR](T)[sP].[dR](T)[sP].[LR](T)[sP]. | | 55.1 | 51.1 |
| | | [dR](T)[sP].[LR](T)[sP].[dR](C)[sP].[LR](T)[sP].[dR](C)[sP].[dR](T)[sP].[dR](C)[sP]. | | | |
| | | [dR](A)[sP].[dR](A)[sP].[dR](C)[sP].[LR](T)[sP].[LR](T) | | | |
| 1787 | 1787_2 | [LR](T)[sP].[LR](T)[sP].[LR](A)[sP].[dR](C)[sP].[LR](T)[sP].[dR](T)[sP].[dR](T)[sP]. | | 60.8 | 57.9 |
| | | [dR](T)[sP].[dR](T)[sP].[dR](C)[sP].[dR](T)[sP].[LR]([5meC])[sP].[dR](T)[sP].[dR](C)[sP]. | | | |
| | | [dR](A)[sP].[dR](A)[sP].[LR]([5meC])[sP].[LR](T) | | | |
| 1789 | 1789_2 | [LR](G)[sP].[LR](T)[sP].[dR](T)[sP].[dR](A)[sP].[LR]([5meC])[sP].[dR](T)[sP].[LR](T)[sP]. | | 73.2 | 58.6 |
| | | [dR](T)[sP].[dR](T)[sP].[dR](T)[sP].[dR](C)[sP].[dR](T)[sP].[dR](C)[sP].[dR](T)[sP]. | | | |
| | | [dR](C)[sP].[LR](A)[sP].[LR](A)[sP].[LR]([5meC]) | | | |
| 1791 | 1791_2 | [LR](A)[sP].[LR](G)[sP].[LR](T)[sP].[dR](T)[sP].[dR](A)[sP].[dR](C)[sP].[LR](T)[sP]. | | 87.5 | 80.5 |
| | | [LR](T)[sP].[LR](T)[sP].[LR](T)[sP].[dR](T)[sP].[dR](C)[sP].[dR](T)[sP].[dR](C)[sP]. | | | |
| | | [dR](T)[sP].[dR](C)[sP].[LR](A)[sP].[LR](A) | | | |
| 1792 | 1792_2 | [LR]([5meC])[sP].[LR](T)[sP].[dR](T)[sP].[dR](T)[sP].[dR](T)[sP].[dR](A)[sP].[dR](C)[sP]. | | 52.4 | 53.2 |
| | | [LR](A)[sP].[dR](T)[sP].[dR](T)[sP].[dR](C)[sP].[dR](C)[sP].[dR](C)[sP].[dR](A)[sP]. | | | |
| | | [dR](T)[sP].[dR](T)[sP].[dR](A)[sP].[LR](A)[sP].[LR]([5meC])[sP].[LR](A) | | | |
| 1794 | 1794_2 | [LR]([5meC])[sP].[LR](T)[sP].[dR](T)[sP].[LR](T)[sP].[dR](T)[sP].[dR](A)[sP].[dR](C)[sP]. | | 70.2 | 70.1 |
| | | [dR](A)[sP].[dR](T)[sP].[dR](T)[sP].[dR](C)[sP].[dR](C)[sP].[dR](C)[sP].[dR](A)[sP]. | | | |
| | | [LR](T)[sP].[dR](T)[sP].[dR](A)[sP].[LR](A)[sP].[LR]([5meC]) | | | |
| 1795 | 1795_2 | [LR](A)[sP].[LR]([5meC])[sP].[dR](T)[sP].[LR](T)[sP].[dR](T)[sP].[dR](T)[sP].[dR](A)[sP]. | | 44.8 | 49.2 |
| | | [dR](C)[sP].[dR](A)[sP].[dR](T)[sP].[LR](T)[sP].[dR](C)[sP].[LR]([5meC])[sP].[dR](C)[sP]. | | | |
| | | [dR](A)[sP].[dR](T)[sP].[dR](T)[sP].[dR](A)[sP].[LR](A)[sP].[LR]([5meC]) | | | |
| 1795 | 1795_3 | [LR](A)[sP].[LR]([5meC])[sP].[dR](T)[sP].[dR](T)[sP].[dR](T)[sP].[LR](T)[sP].[dR](A)[sP]. | | 59.6 | 60.9 |
| | | [dR](C)[sP].[dR](A)[sP].[LR](T)[sP].[dR](T)[sP].[dR](C)[sP].[dR](C)[sP].[dR](C)[sP]. | | | |
| | | [dR](A)[sP].[dR](T)[sP].[dR](T)[sP].[dR](A)[sP].[LR](A)[sP].[LR]([5meC]) | | | |
| 1795 | 1795_4 | [LR](A)[sP].[LR]([5meC])[sP].[dR](T)[sP].[LR](T)[sP].[dR](T)[sP].[dR](T)[sP].[dR](A)[sP]. | | 52.1 | 56.6 |
| | | [dR](C)[sP].[dR](A)[sP].[dR](T)[sP].[LR](T)[sP].[dR](C)[sP].[LR]([5meC])[sP].[dR](C)[sP]. | | | |
| | | [LR](A)[sP].[dR](T)[sP].[dR](T)[sP].[dR](A)[sP].[LR](A)[sP].[LR]([5meC]) | | | |
| 1795 | 1795_5 | [LR](A)[sP].[LR]([5meC])[sP].[LR](T)[sP].[dR](T)[sP].[dR](T)[sP].[dR](T)[sP].[dR](A)[sP]. | | 22.6 | 39 |
| | | [dR](C)[sP].[dR](A)[sP].[dR](T)[sP].[LR](T)[sP].[dR](C)[sP].[dR](C)[sP].[dR](C)[sP]. | | | |
| | | [dR](A)[sP].[dR](T)[sP].[dR](T)[sP].[LR](A)[sP].[LR](A)[sP].[LR]([5meC]) | | | |
| 1795 | 1795_6 | [LR](A)[sP].[LR]([5meC])[sP].[dR](T)[sP].[dR](T)[sP].[dR](T)[sP].[dR](T)[sP].[dR](A)[sP]. | | 52.1 | 52.8 |
| | | [dR](C)[sP].[LR](A)[sP].[LR](T)[sP].[dR](T)[sP].[dR](C)[sP].[dR](C)[sP].[dR](C)[sP]. | | | |
| | | [LR](A)[sP].[LR](T)[sP].[dR](T)[sP].[LR](A)[sP].[LR](A)[sP].[LR]([5meC]) | | | |
| 1795 | 1795_7 | [LR](A)[sP].[LR]([5meC])[sP].[dR](T)[sP].[LR](T)[sP].[dR](T)[sP].[dR](T)[sP].[LR](A)[sP]. | | 36.2 | 38.1 |
| | | [dR](C)[sP].[LR](A)[sP].[dR](T)[sP].[dR](T)[sP].[dR](C)[sP].[dR](C)[sP].[dR](C)[sP]. | | | |
| | | [dR](A)[sP].[dR](T)[sP].[dR](T)[sP].[LR](A)[sP].[LR](A)[sP].[LR]([5meC]) | | | |
| 1795 | 1795_8 | [LR](A)[sP].[LR]([5meC])[sP].[dR](T)[sP].[dR](T)[sP].[dR](T)[sP].[dR](T)[sP].[LR](A)[sP]. | | 42 | 41.5 |
| | | [dR](C)[sP].[dR](A)[sP].[dR](T)[sP].[dR](T)[sP].[dR](C)[sP].[dR](C)[sP].[LR]([5meC])[sP]. | | | |
| | | [dR](A)[sP].[dR](T)[sP].[LR](T)[sP].[LR](A)[sP].[LR](A)[sP].[LR]([5meC]) | | | |
| 1795 | 1795_9 | [LR](A)[sP].[LR]([5meC])[sP].[LR](T)[sP].[LR](T)[sP].[dR](T)[sP].[dR](T)[sP].[dR](A)[sP]. | | 43.4 | 46.5 |
| | | [dR](C)[sP].[dR](A)[sP].[dR](T)[sP].[dR](T)[sP].[dR](C)[sP].[dR](C)[sP].[LR]([5meC])[sP]. | | | |
| | | [dR](A)[sP].[dR](T)[sP].[dR](T)[sP].[LR](A)[sP].[LR](A)[sP].[LR]([5meC]) | | | |
| 1796 | 1796_2 | [LR](A)[sP].[LR]([5meC])[sP].[dR](T)[sP].[dR](T)[sP].[LR](T)[sP].[dR](T)[sP].[LR](A)[sP]. | | 83.4 | 77.4 |
| | | [dR](C)[sP].[dR](A)[sP].[dR](T)[sP].[dR](T)[sP].[dR](C)[sP].[dR](C)[sP].[LR]([5meC])[sP]. | | | |
| | | [LR](A)[sP].[dR](T)[sP].[dR](T)[sP].[LR](A)[sP].[LR](A) | | | |
| 1796 | 1796_3 | [LR](A)[sP].[LR]([5meC])[sP].[dR](T)[sP].[LR](T)[sP].[dR](T)[sP].[dR](T)[sP].[dR](A)[sP]. | | 38 | 48.7 |
| | | [dR](C)[sP].[dR](A)[sP].[dR](T)[sP].[dR](T)[sP].[dR](C)[sP].[dR](C)[sP].[LR]([5meC])[sP]. | | | |
| | | [LR](A)[sP].[dR](T)[sP].[LR](T)[sP].[LR](A)[sP].[LR](A) | | | |
| 1796 | 1796_4 | [LR](A)[sP].[LR]([5meC])[sP].[dR](T)[sP].[dR](T)[sP].[dR](T)[sP].[dR](T)[sP].[LR](A)[sP]. | | 57.5 | 58.3 |
| | | [dR](C)[sP].[dR](A)[sP].[dR](T)[sP].[dR](T)[sP].[dR](C)[sP].[dR](C)[sP].[dR](C)[sP]. | | | |
| | | [dR](A)[sP].[dR](T)[sP].[LR](T)[sP].[LR](A)[sP].[LR](A) | | | |
| 1796 | 1796_5 | [LR](A)[sP].[LR]([5meC])[sP].[dR](T)[sP].[LR](T)[sP].[dR](T)[sP].[dR](T)[sP].[dR](A)[sP]. | | 51.3 | 49.3 |
| | | [dR](C)[sP].[dR](A)[sP].[dR](T)[sP].[LR](T)[sP].[dR](C)[sP].[dR](C)[sP].[LR]([5meC])[sP]. | | | |
| | | [dR](A)[sP].[dR](T)[sP].[LR](T)[sP].[LR](A)[sP].[LR](A) | | | |
| 1797 | 1797_2 | [LR]([5meC])[sP].[LR](T)[sP].[LR](T)[sP].[LR](T)[sP].[dR](T)[sP].[dR](A)[sP].[dR](C)[sP]. | | 78.7 | 71.5 |
| | | [dR](A)[sP].[dR](T)[sP].[dR](T)[sP].[LR]([5meC])[sP].[dR](C)[sP].[dR](C)[sP].[LR](A)[sP]. | | | |
| | | [LR](T)[sP].[dR](T)[sP].[LR](A)[sP].[LR](A) | | | |
| 1797 | 1797_3 | [LR]([5meC])[sP].[LR](T)[sP].[LR](T)[sP].[LR](T)[sP].[dR](T)[sP].[dR](A)[sP].[dR](C)[sP]. | | 66.2 | 66.9 |
| | | [dR](A)[sP].[dR](T)[sP].[dR](T)[sP].[dR](C)[sP].[LR]([5meC])[sP].[LR]([5meC])[sP]. | | | |
| | | [dR](A)[sP].[LR](T)[sP].[dR](T)[sP].[LR](A)[sP].[LR](A) | | | |
| 1798 | 1798_3 | [LR]([5meC])[sP].[LR](A)[sP].[dR](C)[sP].[dR](T)[sP].[dR](T)[sP].[dR](T)[sP].[dR](T)[sP]. | | 25.6 | 42.1 |
| | | [dR](A)[sP].[dR](C)[sP].[dR](A)[sP].[LR](T)[sP].[LR](T)[sP].[dR](C)[sP].[LR]([5meC])[sP]. | | | |
| | | [dR](C)[sP].[dR](A)[sP].[dR](T)[sP].[dR](T)[sP].[LR](A)[sP].[LR](A) | | | |
| 1801 | 1801_2 | [LR]([5meC])[sP].[LR](A)[sP].[dR](C)[sP].[dR](T)[sP].[dR](T)[sP].[dR](T)[sP].[dR](T)[sP]. | | 39.3 | 46.1 |
| | | [dR](A)[sP].[LR]([5meC])[sP].[dR](A)[sP].[dR](T)[sP].[dR](T)[sP].[dR](C)[sP].[dR](C)[sP]. | | | |
| | | [LR]([5meC])[sP].[dR](A)[sP].[dR](T)[sP].[LR](T)[sP].[LR](A) | | | |
| 1802 | 1802_3 | [LR](A)[sP].[LR]([5meC])[sP].[LR](A)[sP].[dR](C)[sP].[dR](T)[sP].[dR](T)[sP].[dR](T)[sP]. | | 26.6 | 31.8 |
| | | [dR](T)[sP].[dR](A)[sP].[dR](C)[sP].[LR](A)[sP].[dR](T)[sP].[dR](T)[sP].[dR](C)[sP]. | | | |
| | | [dR](C)[sP].[dR](C)[sP].[dR](A)[sP].[dR](T)[sP].[LR](T)[sP].[LR](A) | | | |
| 1802 | 1802_4 | [LR](A)[sP].[LR]([5meC])[sP].[dR](A)[sP].[dR](C)[sP].[dR](T)[sP].[dR](T)[sP].[dR](T)[sP]. | | 34.4 | 45.5 |
| | | [dR](T)[sP].[dR](A)[sP].[dR](C)[sP].[LR](A)[sP].[dR](T)[sP].[dR](T)[sP].[dR](C)[sP]. | | | |
| | | [LR]([5meC])[sP].[dR](C)[sP].[LR](A)[sP].[dR](T)[sP].[LR](T)[sP].[LR](A) | | | |
| 1803 | 1803_2 | [LR]([5meC])[sP].[LR](A)[sP].[LR]([5meC])[sP].[dR](T)[sP].[dR](T)[sP].[dR](T)[sP]. | | 22.2 | 35.5 |
| | | [dR](T)[sP].[dR](A)[sP].[dR](C)[sP].[LR](A)[sP].[dR](T)[sP].[dR](T)[sP].[dR](C)[sP]. | | | |
| | | [dR](C)[sP].[LR]([5meC])[sP].[dR](A)[sP].[LR](T)[sP].[LR](T) | | | |
| 1804 | 1804_2 | [LR](T)[sP].[LR](A)[sP].[dR](C)[sP].[LR](A)[sP].[dR](C)[sP].[dR](T)[sP].[dR](T)[sP]. | | 47.1 | 37.1 |
| | | [LR](T)[sP].[dR](T)[sP].[dR](A)[sP].[dR](C)[sP].[LR](A)[sP].[dR](T)[sP].[dR](T)[sP]. | | | |
| | | [dR](C)[sP].[dR](C)[sP].[dR](C)[sP].[dR](A)[sP].[LR](T)[sP].[LR](T) | | | |
| 1805 | 1805_3 | [LR](A)[sP].[LR]([5meC])[sP].[LR](A)[sP].[LR]([5meC])[sP].[dR](T)[sP].[dR](T)[sP]. | | 21.9 | 31 |
| | | [dR](T)[sP].[dR](T)[sP].[dR](A)[sP].[dR](C)[sP].[LR](A)[sP].[dR](T)[sP].[dR](T)[sP]. | | | |
| | | [dR](C)[sP].[dR](C)[sP].[dR](C)[sP].[dR](A)[sP].[LR](T)[sP].[LR](T) | | | |
| 1805 | 1805_4 | [LR](A)[sP].[LR]([5meC])[sP].[LR](A)[sP].[LR]([5meC])[sP].[dR](T)[sP].[mR](U)[sP]. | | 39.4 | 41.9 |
| | | [dR](T)[sP].[dR](T)[sP].[dR](A)[sP].[dR](C)[sP].[dR](A)[sP].[dR](T)[sP].[dR](T)[sP]. | | | |
| | | [dR](C)[sP].[dR](C)[sP].[dR](C)[sP].[dR](A)[sP].[LR](T)[sP].[LR](T) | | | |
| 1806 | 1806_3 | [LR](T)[sP].[LR](A)[sP].[LR]([5meC])[sP].[LR](A)[sP].[dR](C)[sP].[dR](T)[sP].[dR](T)[sP]. | | 22.9 | 30.4 |
| | | [dR](T)[sP].[dR](T)[sP].[dR](A)[sP].[dR](C)[sP].[LR](A)[sP].[dR](T)[sP].[dR](T)[sP]. | | | |
| | | [dR](C)[sP].[dR](C)[sP].[dR](C)[sP].[LR](A)[sP].[LR](T) | | | |
| 1806 | 1806_4 | [LR](T)[sP].[LR](A)[sP].[LR]([5meC])[sP].[dR](A)[sP].[dR](C)[sP].[dR](T)[sP].[dR](T)[sP]. | | 35.8 | 40.9 |
| | | [dR](T)[sP].[dR](T)[sP].[dR](A)[sP].[dR](C)[sP].[LR](A)[sP].[dR](T)[sP].[dR](T)[sP]. | | | |
| | | [dR](C)[sP].[dR](C)[sP].[LR]([5meC])[sP].[LR](A)[sP].[LR](T) | | | |
| 1806 | 1806_5 | [LR](T)[sP].[LR](A)[sP].[LR]([5meC])[sP].[dR](A)[sP].[mR](C)[sP].[dR](T)[sP].[dR](T)[sP]. | | 17.3 | 31.1 |
| | | [dR](T)[sP].[dR](T)[sP].[dR](A)[sP].[dR](C)[sP].[dR](A)[sP].[dR](T)[sP].[dR](T)[sP]. | | | |
| | | [dR](C)[sP].[dR](C)[sP].[LR]([5meC])[sP].[LR](A)[sP].[LR](T) | | | |
| 1806 | 1806_6 | [LR](T)[sP].[LR](A)[sP].[LR]([5meC])[sP].[LR](A)[sP].[dR](C)[sP].[mR](U)[sP].[dR](T)[sP]. | | 23.6 | 31.5 |
| | | [dR](T)[sP].[dR](T)[sP].[dR](A)[sP].[dR](C)[sP].[dR](A)[sP].[dR](T)[sP].[dR](T)[sP]. | | | |
| | | [dR](C)[sP].[dR](C)[sP].[dR](C)[sP].[LR](A)[sP].[LR](T) | | | |
| 1808 | 1808_3 | [LR](G)[sP].[LR](T)[sP].[dR](A)[sP].[dR](C)[sP].[dR](A)[sP].[dR](C)[sP].[LR](T)[sP]. | 32 | 29.5 | 24.5 |
| | | [dR](T)[sP].[dR](T)[sP].[dR](T)[sP].[dR](A)[sP].[dR](C)[sP].[dR](A)[sP].[dR](T)[sP]. | | | |
| | | [dR](T)[sP].[dR](C)[sP].[dR](C)[sP].[LR]([5meC])[sP].[LR](A) | | | |
| 1808 | 1808_4 | [LR](G)[sP].[LR](T)[sP].[dR](A)[sP].[dR](C)[sP].[dR](A)[sP].[dR](C)[sP].[dR](T)[sP]. | 28.8 | 32.3 | 27.2 |
| | | [LR](T)[sP].[dR](T)[sP].[dR](T)[sP].[dR](A)[sP].[dR](C)[sP].[dR](A)[sP].[dR](T)[sP]. | | | |
| | | [dR](T)[sP].[dR](C)[sP].[dR](C)[sP].[LR]([5meC])[sP].[LR](A) | | | |
| 1808 | 1808_5 | [LR](G)[sP].[LR](T)[sP].[dR](A)[sP].[dR](C)[sP].[dR](A)[sP].[dR](C)[sP].[dR](T)[sP]. | 29.1 | 35.3 | 27.6 |
| | | [dR](T)[sP].[LR](T)[sP].[dR](T)[sP].[dR](A)[sP].[dR](C)[sP].[dR](A)[sP].[dR](T)[sP]. | | | |
| | | [dR](T)[sP].[dR](C)[sP].[dR](C)[sP].[LR]([5meC])[sP].[LR](A) | | | |
| 1808 | 1808_6 | [LR](G)[sP].[LR](T)[sP].[dR](A)[sP].[dR](C)[sP].[dR](A)[sP].[dR](C)[sP].[dR](T)[sP]. | | 36.8 | 42.4 |
| | | [dR](T)[sP].[dR](T)[sP].[dR](T)[sP].[dR](A)[sP].[LR]([5meC])[sP].[dR](A)[sP].[dR](T)[sP]. | | | |
| | | [dR](T)[sP].[dR](C)[sP].[dR](C)[sP].[LR]([5meC])[sP].[LR](A) | | | |
| 1808 | 1808_7 | [LR](G)[sP].[LR](T)[sP].[dR](A)[sP].[dR](C)[sP].[dR](A)[sP].[dR](C)[sP].[dR](T)[sP]. | | 42 | 35.5 |
| | | [dR](T)[sP].[dR](T)[sP].[dR](T)[sP].[dR](A)[sP].[dR](C)[sP].[LR](A)[sP].[dR](T)[sP]. | | | |
| | | [dR](T)[sP].[dR](C)[sP].[dR](C)[sP].[LR]([5meC])[sP].[LR](A) | | | |
| 1808 | 1808_8 | [LR](G)[sP].[LR](T)[sP].[dR](A)[sP].[dR](C)[sP].[LR](A)[sP].[dR](C)[sP].[dR](T)[sP]. | 24.6 | | 16.9 |
| | | [dR](T)[sP].[dR](T)[sP].[dR](T)[sP].[dR](A)[sP].[dR](C)[sP].[dR](A)[sP].[dR](T)[sP]. | | | |
| | | [dR](T)[sP].[dR](C)[sP].[dR](C)[sP].[LR]([5meC])[sP].[LR](A) | | | |
| 1808 | 1808_9 | [LR](G)[sP].[LR](T)[sP].[dR](A)[sP].[dR](C)[sP].[dR](A)[sP].[dR](C)[sP].[dR](T)[sP]. | 29.5 | | 25.9 |
| | | [dR](T)[sP].[dR](T)[sP].[dR](T)[sP].[LR](A)[sP].[dR](C)[sP].[dR](A)[sP].[dR](T)[sP]. | | | |
| | | [dR](T)[sP].[dR](C)[sP].[dR](C)[sP].[LR]([5meC])[sP].[LR](A) | | | |
| 1808 | 1808_10 | [LR](G)[sP].[dR](T)[sP].[mR](A)[sP].[dR](C)[sP].[dR](A)[sP].[dR](C)[sP].[dR](T)[sP]. | 38.1 | 12.8 | 30.8 |
| | | [dR](T)[sP].[dR](T)[sP].[dR](T)[sP].[dR](A)[sP].[dR](C)[sP].[dR](A)[sP].[dR](T)[sP]. | | | |
| | | [dR](T)[sP].[dR](C)[sP].[LR]([5meC])[sP].[LR]([5meC])[sP].[LR](A) | | | |
| 1808 | 1808_11 | [LR](G)[sP].[mR](U)[sP].[dR](A)[sP].[dR](C)[sP].[dR](A)[sP].[dR](C)[sP].[dR](T)[sP]. | 23.7 | | 21.4 |
| | | [dR](T)[sP].[dR](T)[sP].[dR](T)[sP].[dR](A)[sP].[dR](C)[sP].[dR](A)[sP].[dR](T)[sP]. | | | |
| | | [dR](T)[sP].[dR](C)[sP].[LR]([5meC])[sP].[LR]([5meC])[sP].[LR](A) | | | |
| 1808 | 1808_12 | [LR](G)[sP].[dR](T)[sP].[dR](A)[sP].[mR](C)[sP].[dR](A)[sP].[dR](C)[sP].[dR](T)[sP]. | 15.1 | | 17 |
| | | [dR](T)[sP].[dR](T)[sP].[dR](T)[sP].[dR](A)[sP].[dR](C)[sP].[dR](A)[sP].[dR](T)[sP]. | | | |
| | | [dR](T)[sP].[dR](C)[sP].[LR]([5meC])[sP].[LR]([5meC])[sP].[LR](A) | | | |
| 1808 | 1808_13 | [LR](G)[sP].[LR](T)[sP].[dR](A)[sP].[mR](C)[sP].[dR](A)[sP].[dR](C)[sP].[dR](T)[sP]. | 31.9 | | 28.3 |
| | | [LR](T)[sP].[dR](T)[sP].[dR](T)[sP].[dR](A)[sP].[dR](C)[sP].[dR](A)[sP].[dR](T)[sP]. | | | |
| | | [dR](T)[sP].[dR](C)[sP].[dR](C)[sP].[LR]([5meC])[sP].[LR](A) | | | |
| 1808 | 1808_14 | [LR](G)[sP].[LR](T)[sP].[dR](A)[sP].[mR](C)[sP].[dR](A)[sP].[dR](C)[sP].[dR](T)[sP]. | 35.9 | | 25.9 |
| | | [dR](T)[sP].[LR](T)[sP].[dR](T)[sP].[dR](A)[sP].[dR](C)[sP].[dR](A)[sP].[dR](T)[sP]. | | | |
| | | [dR](T)[sP].[dR](C)[sP].[dR](C)[sP].[LR]([5meC])[sP].[LR](A) | | | |
| 1808 | 1808_15 | [LR](G)[sP].[LR](T)[sP].[mR](A)[sP].[dR](C)[sP].[dR](A)[sP].[dR](C)[sP].[dR](T)[sP]. | 34.5 | | 22.8 |
| | | [dR](T)[sP].[LR](T)[sP].[dR](T)[sP].[dR](A)[sP].[dR](C)[sP].[dR](A)[sP].[dR](T)[sP]. | | | |
| | | [dR](T)[sP].[dR](C)[sP].[dR](C)[sP].[LR]([5meC])[sP].[LR](A) | | | |
| 1808 | 1808_16 | [LR](G)[sP].[LR](T)[sP].[dR](A)[sP].[dR](C)[sP].[mR](A)[sP].[dR](C)[sP].[dR](T)[sP]. | 32.7 | | 21.8 |
| | | [dR](T)[sP].[LR](T)[sP].[dR](T)[sP].[dR](A)[sP].[dR](C)[sP].[dR](A)[sP].[dR](T)[sP]. | | | |
| | | [dR](T)[sP].[dR](C)[sP].[dR](C)[sP].[LR]([5meC])[sP].[LR](A) | | | |
| 1808 | 1808_17 | [LR](G)[sP].[LR](T)[sP].[dR](A)[sP].[mR](C)[sP].[dR](A)[sP].[dR](C)[sP].[LR](T)[sP]. | 30.3 | | 21.9 |
| | | [dR](T)[sP].[dR](T)[sP].[dR](T)[sP].[dR](A)[sP].[dR](C)[sP].[dR](A)[sP].[dR](T)[sP]. | | | |
| | | [dR](T)[sP].[dR](C)[sP].[dR](C)[sP].[LR]([5meC])[sP].[LR](A) | | | |
| 1808 | 1808_18 | [LR](G)[sP].[dR](T)[sP].[mR](A)[sP].[mR](C)[sP].[dR](A)[sP].[dR](C)[sP].[dR](T)[sP]. | 15 | | 17.3 |
| | | [dR](T)[sP].[dR](T)[sP].[dR](T)[sP].[dR](A)[sP].[dR](C)[sP].[dR](A)[sP].[dR](T)[sP]. | | | |
| | | [dR](T)[sP].[dR](C)[sP].[LR]([5meC])[sP].[LR]([5meC])[sP].[LR](A) | | | |
| 1808 | 1808_19 | [LR](G)[sP].[LR](T)[sP].[mR](A)[sP].[dR](C)[sP].[dR](A)[sP].[dR](C)[sP].[dR](T)[sP]. | 16.1 | | 17.5 |
| | | [dR](T)[sP].[dR](T)[sP].[dR](T)[sP].[dR](A)[sP].[dR](C)[sP].[dR](A)[sP].[dR](T)[sP]. | | | |
| | | [dR](T)[sP].[dR](C)[sP].[LR]([5meC])[sP].[LR]([5meC])[sP].[LR](A) | | | |
| 1808 | 1808_20 | [LR](G)[sP].[dR](T)[sP].[mR](A)[sP].[dR](C)[sP].[mR](A)[sP].[dR](C)[sP].[dR](T)[sP]. | 16.4 | | 14.9 |
| | | [dR](T)[sP].[dR](T)[sP].[dR](T)[sP].[dR](A)[sP].[dR](C)[sP].[dR](A)[sP].[dR](T)[sP]. | | | |
| | | [dR](T)[sP].[dR](C)[sP].[LR]([5meC])[sP].[LR]([5meC])[sP].[LR](A) | | | |
| 1808 | 1808_21 | [LR](G)[sP].[dR](T)[sP].[mR](A)[sP].[dR](C)[sP].[dR](A)[sP].[mR](C)[sP].[dR](T)[sP]. | 10.9 | | 11.8 |
| | | [dR](T)[sP].[dR](T)[sP].[dR](T)[sP].[dR](A)[sP].[dR](C)[sP].[dR](A)[sP].[dR](T)[sP]. | | | |
| | | [dR](T)[sP].[dR](C)[sP].[LR]([5meC])[sP].[LR]([5meC])[sP].[LR](A) | | | |
| 1808 | 1808_22 | [LR](G)[sP].[dR](T)[sP].[mR](A)[sP].[LR]([5meC])[sP].[dR](A)[sP].[dR](C)[sP].[dR](T)[sP]. | 8.46 | | 13.3 |
| | | [dR](T)[sP].[dR](T)[sP].[dR](T)[sP].[dR](A)[sP].[dR](C)[sP].[dR](A)[sP].[dR](T)[sP]. | | | |
| | | [dR](T)[sP].[dR](C)[sP].[LR]([5meC])[sP].[LR]([5meC])[sP].[LR](A) | | | |
| 1808 | 1808_23 | [LR](G)[sP].[LR](T)[sP].[mR](A)[sP].[LR]([5meC])[sP].[dR](A)[sP].[dR](C)[sP].[dR](T)[sP]. | 60.5 | | 51.9 |
| | | [dR](T)[sP].[dR](T)[sP].[dR](T)[sP].[dR](A)[sP].[dR](C)[sP].[dR](A)[sP].[dR](T)[sP]. | | | |
| | | [dR](T)[sP].[dR](C)[sP].[LR]([5meC])[sP].[LR]([5meC])[sP].[LR](A) | | | |
| 1809 | 1809_3 | [LR](G)[sP].[LR](T)[sP].[LR](A)[sP].[dR](C)[sP].[LR](A)[sP].[dR](C)[sP].[dR](T)[sP]. | 32 | 32.8 | 27 |
| | | [dR](T)[sP].[dR](T)[sP].[dR](T)[sP].[dR](A)[sP].[dR](C)[sP].[dR](A)[sP].[dR](T)[sP]. | | | |
| | | [dR](T)[sP].[dR](C)[sP].[LR]([5meC])[sP].[LR]([5meC]) | | | |
| 1809 | 1809_4 | [LR](G)[sP].[LR](T)[sP].[dR](A)[sP].[dR](C)[sP].[dR](A)[sP].[dR](C)[sP].[dR](T)[sP]. | 35.4 | | 23.8 |
| | | [dR](T)[sP].[dR](T)[sP].[dR](T)[sP].[dR](A)[sP].[dR](C)[sP].[dR](A)[sP].[dR](T)[sP]. | | | |
| | | [dR](T)[sP].[dR](C)[sP].[LR]([5meC])[sP].[LR]([5meC]) | | | |
| 1809 | 1809_5 | [LR](G)[sP].[LR](T)[sP].[dR](A)[sP].[dR](C)[sP].[dR](A)[sP].[dR](C)[sP].[dR](T)[sP]. | 17.8 | | 19 |
| | | [dR](T)[sP].[dR](T)[sP].[dR](T)[sP].[dR](A)[sP].[dR](C)[sP].[LR](A)[sP].[dR](T)[sP]. | | | |
| | | [dR](T)[sP].[dR](C)[sP].[LR]([5meC])[sP].[LR]([5meC]) | | | |
| 1809 | 1809_6 | [LR](G)[sP].[LR](T)[sP].[dR](A)[sP].[dR](C)[sP].[LR](A)[sP].[dR](C)[sP].[dR](T)[sP]. | 10.6 | | 12.9 |
| | | [dR](T)[sP].[dR](T)[sP].[dR](T)[sP].[dR](A)[sP].[dR](C)[sP].[dR](A)[sP].[dR](T)[sP]. | | | |
| | | [dR](T)[sP].[dR](C)[sP].[LR]([5meC])[sP].[LR]([5meC]) | | | |
| 1809 | 1809_7 | [LR](G)[sP].[LR](T)[sP].[dR](A)[sP].[dR](C)[sP].[dR](A)[sP].[dR](C)[sP].[dR](T)[sP]. | 27.5 | | 25.3 |
| | | [dR](T)[sP].[dR](T)[sP].[dR](T)[sP].[LR](A)[sP].[dR](C)[sP].[dR](A)[sP].[dR](T)[sP]. | | | |
| | | [dR](T)[sP].[dR](C)[sP].[LR]([5meC])[sP].[LR]([5meC]) | | | |
| 1809 | 1809_8 | [LR](G)[sP].[LR](T)[sP].[dR](A)[sP].[dR](C)[sP].[LR](A)[sP].[dR](C)[sP].[dR](T)[sP]. | 13.4 | | 14.3 |
| | | [dR](T)[sP].[dR](T)[sP].[dR](T)[sP].[dR](A)[sP].[dR](C)[sP].[LR](A)[sP].[dR](T)[sP]. | | | |
| | | [dR](T)[sP].[dR](C)[sP].[LR]([5meC])[sP].[LR]([5meC]) | | | |
| 1809 | 1809_9 | [LR](G)[sP].[LR](T)[sP].[dR](A)[sP].[dR](C)[sP].[dR](A)[sP].[dR](C)[sP].[dR](T)[sP]. | 15 | | 17.3 |
| | | [LR](T)[sP].[dR](T)[sP].[dR](T)[sP].[dR](A)[sP].[dR](C)[sP].[dR](A)[sP].[dR](T)[sP]. | | | |
| | | [dR](T)[sP].[dR](C)[sP].[LR]([5meC])[sP].[LR]([5meC]) | | | |
| 1809 | 1809_10 | [LR](G)[sP].[LR](T)[sP].[dR](A)[sP].[dR](C)[sP].[dR](A)[sP].[dR](C)[sP].[dR](T)[sP]. | 19.1 | | 20.4 |
| | | [dR](T)[sP].[LR](T)[sP].[dR](T)[sP].[dR](A)[sP].[dR](C)[sP].[dR](A)[sP].[dR](T)[sP]. | | | |
| | | [dR](T)[sP].[dR](C)[sP].[LR]([5meC])[sP].[LR]([5meC]) | | | |
| 1809 | 1809_11 | [LR](G)[sP].[LR](T)[sP].[dR](A)[sP].[dR](C)[sP].[dR](A)[sP].[dR](C)[sP].[dR](T)[sP]. | 29.8 | | 30.1 |
| | | [dR](T)[sP].[dR](T)[sP].[dR](T)[sP].[LR](A)[sP].[dR](C)[sP].[LR](A)[sP].[dR](T)[sP]. | | | |
| | | [dR](T)[sP].[dR](C)[sP].[LR]([5meC])[sP].[LR]([5meC]) | | | |
| 1809 | 1809_12 | [LR](G)[sP].[LR](T)[sP].[dR](A)[sP].[dR](C)[sP].[dR](A)[sP].[dR](C)[sP].[dR](T)[sP]. | 32.4 | | 32.1 |
| | | [dR](T)[sP].[LR](T)[sP].[dR](T)[sP].[dR](A)[sP].[dR](C)[sP].[LR](A)[sP].[dR](T)[sP]. | | | |
| | | [dR](T)[sP].[dR](C)[sP].[LR]([5meC])[sP].[LR]([5meC]) | | | |
| 1809 | 1809_13 | [LR](G)[sP].[LR](T)[sP].[dR](A)[sP].[dR](C)[sP].[dR](A)[sP].[dR](C)[sP].[dR](T)[sP]. | 15.8 | | 15.3 |
| | | [dR](T)[sP].[dR](T)[sP].[dR](T)[sP].[dR](A)[sP].[dR](C)[sP].[dR](A)[sP].[LR](T)[sP]. | | | |
| | | [dR](T)[sP].[dR](C)[sP].[LR]([5meC])[sP].[LR]([5meC]) | | | |
| 1809 | 1809_14 | [LR](G)[sP].[LR](T)[sP].[dR](A)[sP].[dR](C)[sP].[dR](A)[sP].[dR](C)[sP].[dR](T)[sP]. | 7.29 | | 11.4 |
| | | [dR](T)[sP].[dR](T)[sP].[dR](T)[sP].[dR](A)[sP].[dR](C)[sP].[dR](A)[sP].[dR](T)[sP]. | | | |
| | | [LR](T)[sP].[dR](C)[sP].[LR]([5meC])[sP].[LR]([5meC]) | | | |
| 1809 | 1809_15 | [LR](G)[sP].[LR](T)[sP].[dR](A)[sP].[dR](C)[sP].[dR](A)[sP].[dR](C)[sP].[dR](T)[sP]. | 14.1 | | 17.8 |
| | | [dR](T)[sP].[dR](T)[sP].[dR](T)[sP].[dR](A)[sP].[dR](C)[sP].[LR](A)[sP].[dR](T)[sP]. | | | |
| | | [LR](T)[sP].[dR](C)[sP].[LR]([5meC])[sP].[LR]([5meC]) | | | |
| 1809 | 1809_16 | [LR](G)[sP].[LR](T)[sP].[dR](A)[sP].[dR](C)[sP].[dR](A)[sP].[dR](C)[sP].[LR](T)[sP]. | 12.6 | | 15 |
| | | [dR](T)[sP].[dR](T)[sP].[dR](T)[sP].[dR](A)[sP].[dR](C)[sP].[dR](A)[sP].[dR](T)[sP]. | | | |
| | | [dR](T)[sP].[dR](C)[sP].[LR]([5meC])[sP].[LR]([5meC]) | | | |
| 1809 | 1809_17 | [LR](G)[sP].[LR](T)[sP].[dR](A)[sP].[dR](C)[sP].[LR](A)[sP].[dR](C)[sP].[dR](T)[sP]. | 9.78 | | 12.9 |
| | | [LR](T)[sP].[dR](T)[sP].[dR](T)[sP].[dR](A)[sP].[dR](C)[sP].[dR](A)[sP].[dR](T)[sP]. | | | |
| | | [dR](T)[sP].[dR](C)[sP].[LR]([5meC])[sP].[LR]([5meC]) | | | |
| 1809 | 1809_18 | [LR](G)[sP].[LR](T)[sP].[dR](A)[sP].[dR](C)[sP].[LR](A)[sP].[dR](C)[sP].[dR](T)[sP]. | 19.4 | | 20.8 |
| | | [dR](T)[sP].[LR](T)[sP].[dR](T)[sP].[dR](A)[sP].[dR](C)[sP].[dR](A)[sP].[dR](T)[sP]. | | | |
| | | [dR](T)[sP].[dR](C)[sP].[LR]([5meC])[sP].[LR]([5meC]) | | | |
| 1809 | 1809_19 | [LR](G)[sP].[LR](T)[sP].[dR](A)[sP].[dR](C)[sP].[dR](A)[sP].[dR](C)[sP].[dR](T)[sP]. | 29.5 | | 31.1 |
| | | [dR](T)[sP].[LR](T)[sP].[dR](T)[sP].[LR](A)[sP].[dR](C)[sP].[dR](A)[sP].[dR](T)[sP]. | | | |
| | | [dR](T)[sP].[dR](C)[sP].[LR]([5meC])[sP].[LR]([5meC]) | | | |
| 1809 | 1809_20 | [LR](G)[sP].[LR](T)[sP].[dR](A)[sP].[dR](C)[sP].[LR](A)[sP].[dR](C)[sP].[dR](T)[sP]. | 6.13 | | 8.07 |
| | | [dR](T)[sP].[dR](T)[sP].[dR](T)[sP].[dR](A)[sP].[dR](C)[sP].[dR](A)[sP].[dR](T)[sP]. | | | |
| | | [LR](T)[sP].[dR](C)[sP].[LR]([5meC])[sP].[LR]([5meC]) | | | |
| 1809 | 1809_21 | [LR](G)[sP].[LR](T)[sP].[dR](A)[sP].[dR](C)[sP].[LR](A)[sP].[dR](C)[sP].[dR](T)[sP]. | 8.25 | | 11 |
| | | [dR](T)[sP].[dR](T)[sP].[dR](T)[sP].[dR](A)[sP].[dR](C)[sP].[dR](A)[sP].[LR](T)[sP]. | | | |
| | | [dR](T)[sP].[dR](C)[sP].[LR]([5meC])[sP].[LR]([5meC]) | | | |
| 1809 | 1809_22 | [LR](G)[sP].[LR](T)[sP].[dR](A)[sP].[dR](C)[sP].[dR](A)[sP].[dR](C)[sP].[dR](T)[sP]. | 32.1 | | 29.4 |
| | | [dR](T)[sP].[dR](T)[sP].[dR](T)[sP].[LR](A)[sP].[dR](C)[sP].[dR](A)[sP].[LR](T)[sP]. | | | |
| | | [dR](T)[sP].[dR](C)[sP].[LR]([5meC])[sP].[LR]([5meC]) | | | |
| 1809 | 1809_23 | [LR](G)[sP].[LR](T)[sP].[dR](A)[sP].[dR](C)[sP].[dR](A)[sP].[dR](C)[sP].[dR](T)[sP]. | 23 | | 26.1 |
| | | [dR](T)[sP].[dR](T)[sP].[dR](T)[sP].[LR](A)[sP].[dR](C)[sP].[dR](A)[sP].[dR](T)[sP]. | | | |
| | | [LR](T)[sP].[dR](C)[sP].[LR]([5meC])[sP].[LR]([5meC]) | | | |
| 1809 | 1809_24 | [LR](G)[sP].[LR](T)[sP].[dR](A)[sP].[LR]([5meC])[sP].[dR](A)[sP].[dR](C)[sP].[dR](T)[sP]. | 40 | | 31.7 |
| | | [dR](T)[sP].[dR](T)[sP].[dR](T)[sP].[dR](A)[sP].[dR](C)[sP].[dR](A)[sP].[dR](T)[sP]. | | | |
| | | [dR](T)[sP].[dR](C)[sP].[LR]([5meC])[sP].[LR]([5meC]) | | | |
| 1809 | 1809_25 | [LR](G)[sP].[LR](T)[sP].[dR](A)[sP].[dR](C)[sP].[LR](A)[sP].[dR](C)[sP].[LR](T)[sP]. | 9.12 | | 12.1 |
| | | [dR](T)[sP].[dR](T)[sP].[dR](T)[sP].[dR](A)[sP].[dR](C)[sP].[dR](A)[sP].[dR](T)[sP]. | | | |
| | | [dR](T)[sP].[dR](C)[sP].[LR]([5meC])[sP].[LR]([5meC]) | | | |
| 1809 | 1809_26 | [LR](G)[sP].[LR](T)[sP].[dR](A)[sP].[dR](C)[sP].[dR](A)[sP].[dR](C)[sP].[dR](T)[sP]. | 15.3 | | 17.6 |
| | | [dR](T)[sP].[dR](T)[sP].[LR](T)[sP].[dR](A)[sP].[dR](C)[sP].[dR](A)[sP].[dR](T)[sP]. | | | |
| | | [dR](T)[sP].[dR](C)[sP].[LR]([5meC])[sP].[LR]([5meC]) | | | |
| 1809 | 1809_27 | [LR](G)[sP].[LR](T)[sP].[dR](A)[sP].[dR](C)[sP].[dR](A)[sP].[dR](C)[sP].[dR](T)[sP]. | 27.2 | | 26.7 |
| | | [dR](T)[sP].[dR](T)[sP].[dR](T)[sP].[dR](A)[sP].[LR]([5meC])[sP].[dR](A)[sP]. | | | |
| | | [dR](T)[sP].[dR](T)[sP].[dR](C)[sP].[LR]([5meC])[sP].[LR]([5meC]) | | | |
| 1809 | 1809_28 | [LR](G)[sP].[LR](T)[sP].[dR](A)[sP].[dR](C)[sP].[dR](A)[sP].[dR](C)[sP].[LR](T)[sP]. | 13.3 | | 16.8 |
| | | [dR](T)[sP].[LR](T)[sP].[dR](T)[sP].[dR](A)[sP].[dR](C)[sP].[dR](A)[sP].[dR](T)[sP]. | | | |
| | | [dR](T)[sP].[dR](C)[sP].[LR]([5meC])[sP].[LR]([5meC]) | | | |
| 1809 | 1809_29 | [LR](G)[sP].[LR](T)[sP].[dR](A)[sP].[dR](C)[sP].[dR](A)[sP].[dR](C)[sP].[dR](T)[sP]. | 35.4 | | 29.1 |
| | | [dR](T)[sP].[dR](T)[sP].[LR](T)[sP].[dR](A)[sP].[dR](C)[sP].[LR](A)[sP].[dR](T)[sP]. | | | |
| | | [dR](T)[sP].[dR](C)[sP].[LR]([5meC])[sP].[LR]([5meC]) | | | |
| 1809 | 1809_30 | [LR](G)[sP].[LR](T)[sP].[dR](A)[sP].[dR](C)[sP].[LR](A)[sP].[dR](C)[sP].[dR](T)[sP]. | 24.4 | | 23.8 |
| | | [dR](T)[sP].[dR](T)[sP].[LR](T)[sP].[dR](A)[sP].[dR](C)[sP].[dR](A)[sP].[dR](T)[sP]. | | | |
| | | [dR](T)[sP].[dR](C)[sP].[LR]([5meC])[sP].[LR]([5meC]) | | | |
| 1809 | 1809_31 | [LR](G)[sP].[LR](T)[sP].[dR](A)[sP].[dR](C)[sP].[dR](A)[sP].[dR](C)[sP].[LR](T)[sP]. | 4.52 | | 7.54 |
| | | [dR](T)[sP].[dR](T)[sP].[dR](T)[sP].[dR](A)[sP].[dR](C)[sP].[dR](A)[sP].[dR](T)[sP]. | | | |
| | | [LR](T)[sP].[dR](C)[sP].[LR]([5meC])[sP].[LR]([5meC]) | | | |
| 1809 | 1809_32 | [LR](G)[sP].[LR](T)[sP].[dR](A)[sP].[dR](C)[sP].[dR](A)[sP].[LR]([5meC])[sP].[dR](T)[sP]. | 8.78 | | 14 |
| | | [dR](T)[sP].[dR](T)[sP].[dR](T)[sP].[dR](A)[sP].[dR](C)[sP].[dR](A)[sP].[dR](T)[sP]. | | | |
| | | [dR](T)[sP].[dR](C)[sP].[LR]([5meC])[sP].[LR]([5meC]) | | | |
| 1809 | 1809_33 | [LR](G)[sP].[LR](T)[sP].[dR](A)[sP].[dR](C)[sP].[dR](A)[sP].[dR](C)[sP].[LR](T)[sP]. | 11.5 | | 10.9 |
| | | [dR](T)[sP].[dR](T)[sP].[dR](T)[sP].[dR](A)[sP].[dR](C)[sP].[dR](A)[sP].[LR](T)[sP]. | | | |
| | | [dR](T)[sP].[dR](C)[sP].[LR]([5meC])[sP].[LR]([5meC]) | | | |
| 1809 | 1809_34 | [LR](G)[sP].[LR](T)[sP].[dR](A)[sP].[dR](C)[sP].[dR](A)[sP].[dR](C)[sP].[dR](T)[sP]. | 20.9 | | 17.2 |
| | | [LR](T)[sP].[LR](T)[sP].[dR](T)[sP].[dR](A)[sP].[dR](C)[sP].[dR](A)[sP].[dR](T)[sP]. | | | |
| | | [dR](T)[sP].[dR](C)[sP].[LR]([5meC])[sP].[LR]([5meC]) | | | |
| 1809 | 1809_35 | [LR](G)[sP].[dR](T)[sP].[LR](A)[sP].[dR](C)[sP].[dR](A)[sP].[dR](C)[sP].[dR](T)[sP]. | 3.28 | | 11.4 |
| | | [dR](T)[sP].[dR](T)[sP].[dR](T)[sP].[dR](A)[sP].[dR](C)[sP].[dR](A)[sP].[dR](T)[sP]. | | | |
| | | [dR](T)[sP].[LR]([5meC])[sP].[LR]([5meC])[sP].[LR]([5meC]) | | | |
| 1809 | 1809_36 | [LR](G)[sP].[LR](T)[sP].[LR](A)[sP].[dR](C)[sP].[mR](A)[sP].[dR](C)[sP].[dR](T)[sP]. | 26.1 | 28.1 | 23.2 |
| | | [dR](T)[sP].[dR](T)[sP].[dR](T)[sP].[dR](A)[sP].[dR](C)[sP].[dR](A)[sP].[dR](T)[sP]. | | | |
| | | [dR](T)[sP].[dR](C)[sP].[LR]([5meC])[sP].[LR]([5meC]) | | | |
| 1809 | 1809_37 | [LR](G)[sP].[dR](T)[sP].[mR](A)[sP].[dR](C)[sP].[dR](A)[sP].[dR](C)[sP].[dR](T)[sP]. | 4.08 | 4.56 | 8.21 |
| | | [dR](T)[sP].[dR](T)[sP].[dR](T)[sP].[dR](A)[sP].[dR](C)[sP].[dR](A)[sP].[dR](T)[sP]. | | | |
| | | [dR](T)[sP].[LR]([5meC])[sP].[LR]([5meC])[sP].[LR]([5meC]) | | | |
| 1809 | 1809_38 | [LR](G)[sP].[LR](T)[sP].[LR](A)[sP].[mR](C)[sP].[dR](A)[sP].[dR](C)[sP].[dR](T)[sP]. | 30.4 | | 28.1 |
| | | [dR](T)[sP].[dR](T)[sP].[dR](T)[sP].[dR](A)[sP].[dR](C)[sP].[dR](A)[sP].[dR](T)[sP]. | | | |
| | | [dR](T)[sP].[dR](C)[sP].[LR]([5meC])[sP].[LR]([5meC]) | | | |
| 1809 | 1809_39 | [LR](G)[sP].[LR](T)[sP].[mR](A)[sP].[dR](C)[sP].[dR](A)[sP].[dR](C)[sP].[dR](T)[sP]. | 25.8 | | 24.3 |
| | | [dR](T)[sP].[dR](T)[sP].[dR](T)[sP].[dR](A)[sP].[dR](C)[sP].[dR](A)[sP].[dR](T)[sP]. | | | |
| | | [dR](T)[sP].[dR](C)[sP].[LR]([5meC])[sP].[LR]([5meC]) | | | |
| 1809 | 1809_40 | [LR](G)[sP].[LR](T)[sP].[LR](A)[sP].[dR](C)[sP].[mR](A)[sP].[mR](C)[sP].[dR](T)[sP]. | 24.7 | | 22.4 |
| | | [dR](T)[sP].[dR](T)[sP].[dR](T)[sP].[dR](A)[sP].[dR](C)[sP].[dR](A)[sP].[dR](T)[sP]. | | | |
| | | [dR](T)[sP].[dR](C)[sP].[LR]([5meC])[sP].[LR]([5meC]) | | | |
| 1809 | 1809_41 | [LR](G)[sP].[LR](T)[sP].[LR](A)[sP].[dR](C)[sP].[mR](A)[sP].[dR](C)[sP].[mR](U)[sP]. | 34.7 | | 24.7 |
| | | [dR](T)[sP].[dR](T)[sP].[dR](T)[sP].[dR](A)[sP].[dR](C)[sP].[dR](A)[sP].[dR](T)[sP]. | | | |
| | | [dR](T)[sP].[dR](C)[sP].[LR]([5meC])[sP].[LR]([5meC]) | | | |
| 1809 | 1809_42 | [LR](G)[sP].[mR](U)[sP].[dR](A)[sP].[dR](C)[sP].[dR](A)[sP].[dR](C)[sP].[dR](T)[sP]. | 8.81 | | 15.6 |
| | | [dR](T)[sP].[dR](T)[sP].[dR](T)[sP].[dR](A)[sP].[dR](C)[sP].[dR](A)[sP].[dR](T)[sP]. | | | |
| | | [dR](T)[sP].[LR]([5meC])[sP].[LR]([5meC])[sP].[LR]([5meC]) | | | |
| 1809 | 1809_43 | [LR](G)[sP].[dR](T)[sP].[mR](A)[sP].[dR](C)[sP].[LR](A)[sP].[dR](C)[sP].[dR](T)[sP]. | 12.1 | | 20 |
| | | [dR](T)[sP].[dR](T)[sP].[dR](T)[sP].[dR](A)[sP].[dR](C)[sP].[dR](A)[sP].[dR](T)[sP]. | | | |
| | | [dR](T)[sP].[LR]([5meC])[sP].[LR]([5meC])[sP].[LR]([5meC]) | | | |
| 1809 | 1809_44 | [LR](G)[sP].[dR](T)[sP].[mR](A)[sP].[dR](C)[sP].[dR](A)[sP].[LR]([5meC])[sP].[dR](T)[sP]. | 6.2 | | 16.9 |
| | | [dR](T)[sP].[dR](T)[sP].[dR](T)[sP].[dR](A)[sP].[dR](C)[sP].[dR](A)[sP].[dR](T)[sP]. | | | |
| | | [dR](T)[sP].[LR]([5meC])[sP].[LR]([5meC])[sP].[LR]([5meC]) | | | |
| 1809 | 1809_45 | [LR](G)[sP].[dR](T)[sP].[mR](A)[sP].[mR](C)[sP].[dR](A)[sP].[dR](C)[sP].[dR](T)[sP]. | 7.22 | | 12.3 |
| | | [dR](T)[sP].[dR](T)[sP].[dR](T)[sP].[dR](A)[sP].[dR](C)[sP].[dR](A)[sP].[dR](T)[sP]. | | | |
| | | [dR](T)[sP].[LR]([5meC])[sP].[LR]([5meC])[sP].[LR]([5meC]) | | | |
| 1809 | 1809_46 | [LR](G)[sP].[mR](U)[sP].[mR](A)[sP].[dR](C)[sP].[dR](A)[sP].[dR](C)[sP].[dR](T)[sP]. | 5.67 | | 11.8 |
| | | [dR](T)[sP].[dR](T)[sP].[dR](T)[sP].[dR](A)[sP].[dR](C)[sP].[dR](A)[sP].[dR](T)[sP]. | | | |
| | | [dR](T)[sP].[LR]([5meC])[sP].[LR]([5meC])[sP].[LR]([5meC]) | | | |
| 1809 | 1809_47 | [LR](G)[sP].[dR](T)[sP].[mR](A)[sP].[LR]([5meC])[sP].[dR](A)[sP].[dR](C)[sP].[dR](T)[sP]. | 3.94 | | 12.8 |
| | | [dR](T)[sP].[dR](T)[sP].[dR](T)[sP].[dR](A)[sP].[dR](C)[sP].[dR](A)[sP].[dR](T)[sP]. | | | |
| | | [dR](T)[sP].[LR]([5meC])[sP].[LR]([5meC])[sP].[LR]([5meC]) | | | |
| 1809 | 1809_48 | [LR](G)[sP].[LR](T)[sP].[mR](A)[sP].[dR](C)[sP].[dR](A)[sP].[dR](C)[sP].[dR](T)[sP]. | 8.16 | | 17.8 |
| | | [dR](T)[sP].[dR](T)[sP].[dR](T)[sP].[dR](A)[sP].[dR](C)[sP].[dR](A)[sP].[dR](T)[sP]. | | | |
| | | [dR](T)[sP].[LR]([5meC])[sP].[LR]([5meC])[sP].[LR]([5meC]) | | | |
| 1809 | 1809_49 | [LR](G)[sP].[LR](T)[sP].[mR](A)[sP].[LR]([5meC])[sP].[dR](A)[sP].[dR](C)[sP].[dR](T)[sP]. | 49.8 | | 52.2 |
| | | [dR](T)[sP].[dR](T)[sP].[dR](T)[sP].[dR](A)[sP].[dR](C)[sP].[dR](A)[sP].[dR](T)[sP]. | | | |
| | | [dR](T)[sP].[LR]([5meC])[sP].[LR]([5meC])[sP].[LR]([5meC]) | | | |
| 1809 | 1809_50 | [LR](G)[sP].[LR](T)[sP].[mR](A)[sP].[dR](C)[sP].[LR](A)[sP].[dR](C)[sP].[dR](T)[sP]. | 6.83 | | 14.6 |
| | | [dR](T)[sP].[dR](T)[sP].[dR](T)[sP].[dR](A)[sP].[dR](C)[sP].[dR](A)[sP].[dR](T)[sP]. | | | |
| | | [dR](T)[sP].[LR]([5meC])[sP].[LR]([5meC])[sP].[LR]([5meC]) | | | |
| 1809 | 1809_51 | [LR](G)[sP].[dR](T)[sP].[mR](A)[sP].[LR]([5meC])[sP].[LR](A)[sP].[dR](C)[sP].[dR](T)[sP]. | 2.62 | | 10.9 |
| | | [dR](T)[sP].[dR](T)[sP].[dR](T)[sP].[dR](A)[sP].[dR](C)[sP].[dR](A)[sP].[dR](T)[sP]. | | | |
| | | [dR](T)[sP].[LR]([5meC])[sP].[LR]([5meC])[sP].[LR]([5meC]) | | | |
| 1809 | 1809_52 | [LR](G)[sP].[dR](T)[sP].[LR](A)[sP].[dR](C)[sP].[mR](A)[sP].[dR](C)[sP].[dR](T)[sP]. | 3.24 | | 9.82 |
| | | [dR](T)[sP].[dR](T)[sP].[dR](T)[sP].[dR](A)[sP].[dR](C)[sP].[dR](A)[sP].[dR](T)[sP]. | | | |
| | | [dR](T)[sP].[LR]([5meC])[sP].[LR]([5meC])[sP].[LR]([5meC]) | | | |
| 1809 | 1809_53 | [LR](G)[sP].[LR](T)[sP].[dR](A)[sP].[dR](C)[sP].[dR](A)[sP].[dR](C)[sP].[dR](T)[sP]. | 25.8 | | 28.2 |
| | | [dR](T)[sP].[dR](T)[sP].[mR](U)[sP].[dR](A)[sP].[dR](C)[sP].[mR](A)[sP].[dR](T)[sP]. | | | |
| | | [dR](T)[sP].[dR](C)[sP].[LR]([5meC])[sP].[LR]([5meC]) | | | |
| 1809 | 1809_54 | [LR](G)[sP].[LR](T)[sP].[dR](A)[sP].[dR](C)[sP].[dR](A)[sP].[mR](C)[sP].[dR](T)[sP]. | 19.2 | | 19.5 |
| | | [dR](T)[sP].[dR](T)[sP].[dR](T)[sP].[dR](A)[sP].[dR](C)[sP].[dR](A)[sP].[dR](T)[sP]. | | | |
| | | [dR](T)[sP].[dR](C)[sP].[LR]([5meC])[sP].[LR]([5meC]) | | | |
| 1809 | 1809_55 | [LR](G)[sP].[LR](T)[sP].[dR](A)[sP].[dR](C)[sP].[dR](A)[sP].[LR]([5meC])[sP].[dR](T)[sP]. | 18 | | 23.6 |
| | | [mR](U)[sP].[dR](T)[sP].[dR](T)[sP].[dR](A)[sP].[dR](C)[sP].[dR](A)[sP].[dR](T)[sP]. | | | |
| | | [dR](T)[sP].[dR](C)[sP].[LR]([5meC])[sP].[LR]([5meC]) | | | |
| 1809 | 1809_56 | [LR](G)[sP].[LR](T)[sP].[dR](A)[sP].[dR](C)[sP].[mR](A)[sP].[dR](C)[sP].[dR](T)[sP]. | 23.5 | | 22.1 |
| | | [dR](T)[sP].[dR](T)[sP].[mR](U)[sP].[dR](A)[sP].[dR](C)[sP].[dR](A)[sP].[dR](T)[sP]. | | | |
| | | [dR](T)[sP].[dR](C)[sP].[LR]([5meC])[sP].[LR]([5meC]) | | | |
| 1809 | 1809_57 | [LR](G)[sP].[LR](T)[sP].[dR](A)[sP].[dR](C)[sP].[dR](A)[sP].[dR](C)[sP].[mR](U)[sP]. | 6.27 | | 13.3 |
| | | [dR](T)[sP].[dR](T)[sP].[dR](T)[sP].[dR](A)[sP].[dR](C)[sP].[dR](A)[sP].[dR](T)[sP]. | | | |
| | | [LR](T)[sP].[dR](C)[sP].[LR]([5meC])[sP].[LR]([5meC]) | | | |
| 1809 | 1809_58 | [LR](G)[sP].[LR](T)[sP].[dR](A)[sP].[dR](C)[sP].[dR](A)[sP].[dR](C)[sP].[dR](T)[sP]. | 34.7 | | 31 |
| | | [mR](U)[sP].[mR](U)[sP].[dR](T)[sP].[dR](A)[sP].[dR](C)[sP].[dR](A)[sP].[dR](T)[sP]. | | | |
| | | [dR](T)[sP].[dR](C)[sP].[LR]([5meC])[sP].[LR]([5meC]) | | | |
| 1809 | 1809_59 | [LR](G)[sP].[LR](T)[sP].[dR](A)[sP].[dR](C)[sP].[dR](A)[sP].[dR](C)[sP].[mR](U)[sP]. | 18.8 | | 19.1 |
| | | [dR](T)[sP].[dR](T)[sP].[dR](T)[sP].[dR](A)[sP].[dR](C)[sP].[dR](A)[sP].[LR](T)[sP]. | | | |
| | | [dR](T)[sP].[dR](C)[sP].[LR]([5meC])[sP].[LR]([5meC]) | | | |
| 1809 | 1809_60 | [LR](G)[sP].[LR](T)[sP].[dR](A)[sP].[dR](C)[sP].[dR](A)[sP].[dR](C)[sP].[dR](T)[sP]. | 10.2 | | 15.2 |
| | | [dR](T)[sP].[dR](T)[sP].[dR](T)[sP].[mR](A)[sP].[dR](C)[sP].[dR](A)[sP].[dR](T)[sP]. | | | |
| | | [LR](T)[sP].[dR](C)[sP].[LR]([5meC])[sP].[LR]([5meC]) | | | |
| 1809 | 1809_61 | [LR](G)[sP].[LR](T)[sP].[dR](A)[sP].[dR](C)[sP].[dR](A)[sP].[dR](C)[sP].[dR](T)[sP]. | 27.1 | | 19.7 |
| | | [dR](T)[sP].[dR](T)[sP].[dR](T)[sP].[mR](A)[sP].[dR](C)[sP].[dR](A)[sP].[LR](T)[sP]. | | | |
| | | [dR](T)[sP].[dR](C)[sP].[LR]([5meC])[sP].[LR]([5meC]) | | | |
| 1809 | 1809_62 | [LR](G)[sP].[mR](U)[sP].[mR](A)[sP].[mR](C)[sP].[dR](A)[sP].[dR](C)[sP].[dR](T)[sP]. | 5.46 | | 11.5 |
| | | [dR](T)[sP].[dR](T)[sP].[dR](T)[sP].[dR](A)[sP].[dR](C)[sP].[dR](A)[sP].[dR](T)[sP]. | | | |
| | | [dR](T)[sP].[LR]([5meC])[sP].[LR]([5meC])[sP].[LR]([5meC]) | | | |
| 1810 | 1810_2 | [LR](T)[sP].[LR](A)[sP].[LR]([5meC])[sP].[dR](A)[sP].[dR](C)[sP].[dR](T)[sP].[dR](T)[sP]. | | 29.4 | 35.8 |
| | | [dR](T)[sP].[dR](T)[sP].[LR](A)[sP].[dR](C)[sP].[dR](A)[sP].[dR](T)[sP].[dR](T)[sP]. | | | |
| | | [dR](C)[sP].[LR]([5meC])[sP].[LR]([5meC]) | | | |
| 1810 | 1810_3 | [LR](T)[sP].[LR](A)[sP].[LR]([5meC])[sP].[dR](A)[sP].[dR](C)[sP].[dR](T)[sP].[dR](T)[sP]. | 20.4 | 11.5 | 24.7 |
| | | [dR](T)[sP].[dR](T)[sP].[dR](A)[sP].[dR](C)[sP].[LR](A)[sP].[dR](T)[sP].[dR](T)[sP]. | | | |
| | | [dR](C)[sP].[LR]([5meC])[sP].[LR]([5meC]) | | | |
| 1810 | 1810_4 | [LR](T)[sP].[LR](A)[sP].[dR](C)[sP].[dR](A)[sP].[dR](C)[sP].[dR](T)[sP].[dR](T)[sP]. | 42.7 | | 39 |
| | | [dR](T)[sP].[dR](T)[sP].[dR](A)[sP].[dR](C)[sP].[dR](A)[sP].[dR](T)[sP].[dR](T)[sP]. | | | |
| | | [dR](C)[sP].[LR]([5meC])[sP].[LR]([5meC]) | | | |
| 1810 | 1810_5 | [LR](T)[sP].[LR](A)[sP].[dR](C)[sP].[dR](A)[sP].[dR](C)[sP].[dR](T)[sP].[dR](T)[sP]. | 26.1 | | 25.4 |
| | | [dR](T)[sP].[dR](T)[sP].[dR](A)[sP].[dR](C)[sP].[LR](A)[sP].[dR](T)[sP].[dR](T)[sP]. | | | |
| | | [dR](C)[sP].[LR]([5meC])[sP].[LR]([5meC]) | | | |
| 1810 | 1810_6 | [LR](T)[sP].[LR](A)[sP].[dR](C)[sP].[LR](A)[sP].[dR](C)[sP].[dR](T)[sP].[dR](T)[sP]. | 6.09 | | 11.4 |
| | | [dR](T)[sP].[dR](T)[sP].[dR](A)[sP].[dR](C)[sP].[dR](A)[sP].[dR](T)[sP].[dR](T)[sP]. | | | |
| | | [dR](C)[sP].[LR]([5meC])[sP].[LR]([5meC]) | | | |
| 1810 | 1810_7 | [LR](T)[sP].[LR](A)[sP].[dR](C)[sP].[dR](A)[sP].[dR](C)[sP].[dR](T)[sP].[dR](T)[sP]. | 42.1 | | 32.8 |
| | | [dR](T)[sP].[dR](T)[sP].[LR](A)[sP].[dR](C)[sP].[dR](A)[sP].[dR](T)[sP].[dR](T)[sP]. | | | |
| | | [dR](C)[sP].[LR]([5meC])[sP].[LR]([5meC]) | | | |
| 1810 | 1810_8 | [LR](T)[sP].[LR](A)[sP].[dR](C)[sP].[LR](A)[sP].[dR](C)[sP].[dR](T)[sP].[dR](T)[sP]. | 9.28 | | 10.1 |
| | | [dR](T)[sP].[dR](T)[sP].[dR](A)[sP].[dR](C)[sP].[LR](A)[sP].[dR](T)[sP].[dR](T)[sP]. | | | |
| | | [dR](C)[sP].[LR]([5meC])[sP].[LR]([5meC]) | | | |
| 1810 | 1810_9 | [LR](T)[sP].[LR](A)[sP].[dR](C)[sP].[dR](A)[sP].[dR](C)[sP].[dR](T)[sP].[dR](T)[sP]. | 65.8 | | 58.4 |
| | | [dR](T)[sP].[dR](T)[sP].[LR](A)[sP].[dR](C)[sP].[LR](A)[sP].[dR](T)[sP].[dR](T)[sP]. | | | |
| | | [dR](C)[sP].[LR]([5meC])[sP].[LR]([5meC]) | | | |
| 1810 | 1810_10 | [LR](T)[sP].[LR](A)[sP].[dR](C)[sP].[dR](A)[sP].[dR](C)[sP].[dR](T)[sP].[LR](T)[sP]. | 23 | | 26.3 |
| | | [dR](T)[sP].[dR](T)[sP].[dR](A)[sP].[dR](C)[sP].[dR](A)[sP].[dR](T)[sP].[dR](T)[sP]. | | | |
| | | [dR](C)[sP].[LR]([5meC])[sP].[LR]([5meC]) | | | |
| 1810 | 1810_11 | [LR](T)[sP].[LR](A)[sP].[dR](C)[sP].[dR](A)[sP].[dR](C)[sP].[dR](T)[sP].[dR](T)[sP]. | 29.3 | | 24.7 |
| | | [LR](T)[sP].[dR](T)[sP].[dR](A)[sP].[dR](C)[sP].[dR](A)[sP].[dR](T)[sP].[dR](T)[sP]. | | | |
| | | [dR](C)[sP].[LR]([5meC])[sP].[LR]([5meC]) | | | |
| 1810 | 1810_12 | [LR](T)[sP].[LR](A)[sP].[dR](C)[sP].[dR](A)[sP].[dR](C)[sP].[dR](T)[sP].[dR](T)[sP]. | 5.65 | | 10.3 |
| | | [dR](T)[sP].[dR](T)[sP].[dR](A)[sP].[dR](C)[sP].[dR](A)[sP].[dR](T)[sP].[LR](T)[sP]. | | | |
| | | [dR](C)[sP].[LR]([5meC])[sP].[LR]([5meC]) | | | |
| 1810 | 1810_13 | [LR](T)[sP].[LR](A)[sP].[dR](C)[sP].[LR](A)[sP].[dR](C)[sP].[dR](T)[sP].[LR](T)[sP]. | 9.33 | | 15.3 |
| | | [dR](T)[sP].[dR](T)[sP].[dR](A)[sP].[dR](C)[sP].[dR](A)[sP].[dR](T)[sP].[dR](T)[sP]. | | | |
| | | [dR](C)[sP].[LR]([5meC])[sP].[LR]([5meC]) | | | |
| 1810 | 1810_14 | [LR](T)[sP].[LR](A)[sP].[dR](C)[sP].[LR](A)[sP].[dR](C)[sP].[dR](T)[sP].[dR](T)[sP]. | 21.7 | | 25.1 |
| | | [LR](T)[sP].[dR](T)[sP].[dR](A)[sP].[dR](C)[sP].[dR](A)[sP].[dR](T)[sP].[dR](T)[sP]. | | | |
| | | [dR](C)[sP].[LR]([5meC])[sP].[LR]([5meC]) | | | |
| 1810 | 1810_15 | [LR](T)[sP].[LR](A)[sP].[dR](C)[sP].[dR](A)[sP].[dR](C)[sP].[dR](T)[sP].[dR](T)[sP]. | 21.6 | | 19.3 |
| | | [dR](T)[sP].[dR](T)[sP].[dR](A)[sP].[dR](C)[sP].[dR](A)[sP].[LR](T)[sP].[dR](T)[sP]. | | | |
| | | [dR](C)[sP].[LR]([5meC])[sP].[LR]([5meC]) | | | |
| 1810 | 1810_16 | [LR](T)[sP].[LR](A)[sP].[dR](C)[sP].[dR](A)[sP].[dR](C)[sP].[dR](T)[sP].[dR](T)[sP]. | 25.2 | | 20.4 |
| | | [dR](T)[sP].[dR](T)[sP].[dR](A)[sP].[dR](C)[sP].[LR](A)[sP].[dR](T)[sP].[LR](T)[sP]. | | | |
| | | [dR](C)[sP].[LR]([5meC])[sP].[LR]([5meC]) | | | |
| 1810 | 1810_17 | [LR](T)[sP].[LR](A)[sP].[dR](C)[sP].[dR](A)[sP].[dR](C)[sP].[LR](T)[sP].[dR](T)[sP]. | 17.4 | | 20.8 |
| | | [dR](T)[sP].[dR](T)[sP].[dR](A)[sP].[dR](C)[sP].[dR](A)[sP].[dR](T)[sP].[dR](T)[sP]. | | | |
| | | [dR](C)[sP].[LR]([5meC])[sP].[LR]([5meC]) | | | |
| 1810 | 1810_18 | [LR](T)[sP].[LR](A)[sP].[dR](C)[sP].[LR](A)[sP].[dR](C)[sP].[dR](T)[sP].[dR](T)[sP]. | 2.49 | | 6.01 |
| | | [dR](T)[sP].[dR](T)[sP].[dR](A)[sP].[dR](C)[sP].[dR](A)[sP].[dR](T)[sP].[LR](T)[sP]. | | | |
| | | [dR](C)[sP].[LR]([5meC])[sP].[LR]([5meC]) | | | |
| 1810 | 1810_19 | [LR](T)[sP].[LR](A)[sP].[dR](C)[sP].[dR](A)[sP].[dR](C)[sP].[dR](T)[sP].[dR](T)[sP]. | 35.9 | | 31.5 |
| | | [dR](T)[sP].[dR](T)[sP].[LR](A)[sP].[dR](C)[sP].[dR](A)[sP].[dR](T)[sP].[LR](T)[sP]. | | | |
| | | [dR](C)[sP].[LR]([5meC])[sP].[LR]([5meC]) | | | |
| 1810 | 1810_20 | [LR](T)[sP].[LR](A)[sP].[dR](C)[sP].[LR](A)[sP].[dR](C)[sP].[dR](T)[sP].[dR](T)[sP]. | 32.3 | | 26.8 |
| | | [dR](T)[sP].[dR](T)[sP].[dR](A)[sP].[dR](C)[sP].[LR](A)[sP].[dR](T)[sP].[LR](T)[sP]. | | | |
| | | [dR](C)[sP].[LR]([5meC])[sP].[LR]([5meC]) | | | |
| 1810 | 1810_21 | [LR](T)[sP].[LR](A)[sP].[dR](C)[sP].[LR](A)[sP].[dR](C)[sP].[LR](T)[sP].[dR](T)[sP]. | 6.85 | | 8.99 |
| | | [dR](T)[sP].[dR](T)[sP].[dR](A)[sP].[dR](C)[sP].[dR](A)[sP].[dR](T)[sP].[dR](T)[sP]. | | | |
| | | [dR](C)[sP].[LR]([5meC])[sP].[LR]([5meC]) | | | |
| 1810 | 1810_22 | [LR](T)[sP].[LR](A)[sP].[dR](C)[sP].[LR](A)[sP].[dR](C)[sP].[dR](T)[sP].[dR](T)[sP]. | 5.42 | | 9.71 |
| | | [dR](T)[sP].[dR](T)[sP].[dR](A)[sP].[dR](C)[sP].[dR](A)[sP].[LR](T)[sP].[dR](T)[sP]. | | | |
| | | [dR](C)[sP].[LR]([5meC])[sP].[LR]([5meC]) | | | |
| 1810 | 1810_23 | [LR](T)[sP].[LR](A)[sP].[dR](C)[sP].[dR](A)[sP].[dR](C)[sP].[dR](T)[sP].[dR](T)[sP]. | 45.2 | | 36.4 |
| | | [dR](T)[sP].[dR](T)[sP].[LR](A)[sP].[dR](C)[sP].[dR](A)[sP].[LR](T)[sP].[dR](T)[sP]. | | | |
| | | [dR](C)[sP].[LR]([5meC])[sP].[LR]([5meC]) | | | |
| 1810 | 1810_24 | [LR](T)[sP].[LR](A)[sP].[dR](C)[sP].[dR](A)[sP].[dR](C)[sP].[dR](T)[sP].[LR](T)[sP]. | 13.1 | | 16 |
| | | [dR](T)[sP].[dR](T)[sP].[dR](A)[sP].[dR](C)[sP].[dR](A)[sP].[dR](T)[sP].[LR](T)[sP]. | | | |
| | | [dR](C)[sP].[LR]([5meC])[sP].[LR]([5meC]) | | | |
| 1810 | 1810_25 | [LR](T)[sP].[LR](A)[sP].[dR](C)[sP].[dR](A)[sP].[dR](C)[sP].[dR](T)[sP].[dR](T)[sP]. | 74.6 | | 73.2 |
| | | [dR](T)[sP].[dR](T)[sP].[LR](A)[sP].[dR](C)[sP].[LR](A)[sP].[dR](T)[sP].[LR](T)[sP]. | | | |
| | | [dR](C)[sP].[LR]([5meC])[sP].[LR]([5meC]) | | | |
| 1810 | 1810_26 | [LR](T)[sP].[LR](A)[sP].[dR](C)[sP].[dR](A)[sP].[dR](C)[sP].[dR](T)[sP].[dR](T)[sP]. | 23.3 | | 19.9 |
| | | [dR](T)[sP].[LR](T)[sP].[dR](A)[sP].[dR](C)[sP].[dR](A)[sP].[dR](T)[sP].[dR](T)[sP]. | | | |
| | | [dR](C)[sP].[LR]([5meC])[sP].[LR]([5meC]) | | | |
| 1810 | 1810_27 | [LR](T)[sP].[LR](A)[sP].[dR](C)[sP].[dR](A)[sP].[dR](C)[sP].[dR](T)[sP].[dR](T)[sP]. | 50.1 | | 41.2 |
| | | [dR](T)[sP].[dR](T)[sP].[dR](A)[sP].[LR]([5meC])[sP].[dR](A)[sP].[dR](T)[sP].[dR](T)[sP]. | | | |
| | | [dR](C)[sP].[LR]([5meC])[sP].[LR]([5meC]) | | | |
| 1810 | 1810_28 | [LR](T)[sP].[LR](A)[sP].[dR](C)[sP].[dR](A)[sP].[dR](C)[sP].[LR](T)[sP].[dR](T)[sP]. | 24.2 | | 26.6 |
| | | [LR](T)[sP].[dR](T)[sP].[dR](A)[sP].[dR](C)[sP].[dR](A)[sP].[dR](T)[sP].[dR](T)[sP]. | | | |
| | | [dR](C)[sP].[LR]([5meC])[sP].[LR]([5meC]) | | | |
| 1810 | 1810_29 | [LR](T)[sP].[LR](A)[sP].[dR](C)[sP].[LR](A)[sP].[dR](C)[sP].[dR](T)[sP].[dR](T)[sP]. | 21.6 | | 23.9 |
| | | [dR](T)[sP].[dR](T)[sP].[dR](A)[sP].[LR]([5meC])[sP].[dR](A)[sP].[dR](T)[sP].[dR](T)[sP]. | | | |
| | | [dR](C)[sP].[LR]([5meC])[sP].[LR]([5meC]) | | | |
| 1810 | 1810_30 | [LR](T)[sP].[LR](A)[sP].[dR](C)[sP].[dR](A)[sP].[dR](C)[sP].[dR](T)[sP].[dR](T)[sP]. | 66.5 | | 60.9 |
| | | [dR](T)[sP].[LR](T)[sP].[dR](A)[sP].[dR](C)[sP].[LR](A)[sP].[dR](T)[sP].[dR](T)[sP]. | | | |
| | | [dR](C)[sP].[LR]([5meC])[sP].[LR]([5meC]) | | | |
| 1810 | 1810_31 | [LR](T)[sP].[LR](A)[sP].[dR](C)[sP].[LR](A)[sP].[dR](C)[sP].[dR](T)[sP].[LR](T)[sP]. | 32.6 | | 26.9 |
| | | [dR](T)[sP].[dR](T)[sP].[dR](A)[sP].[dR](C)[sP].[dR](A)[sP].[dR](T)[sP].[LR](T)[sP]. | | | |
| | | [dR](C)[sP].[LR]([5meC])[sP].[LR]([5meC]) | | | |
| 1810 | 1810_32 | [LR](T)[sP].[LR](A)[sP].[dR](C)[sP].[LR](A)[sP].[dR](C)[sP].[LR](T)[sP].[dR](T)[sP]. | 43.5 | | 39.2 |
| | | [LR](T)[sP].[dR](T)[sP].[dR](A)[sP].[dR](C)[sP].[dR](A)[sP].[dR](T)[sP].[dR](T)[sP]. | | | |
| | | [dR](C)[sP].[LR]([5meC])[sP].[LR]([5meC]) | | | |
| 1810 | 1810_33 | [LR](T)[sP].[LR](A)[sP].[dR](C)[sP].[LR](A)[sP].[dR](C)[sP].[dR](T)[sP].[dR](T)[sP]. | 30.4 | | 27.8 |
| | | [dR](T)[sP].[LR](T)[sP].[dR](A)[sP].[dR](C)[sP].[dR](A)[sP].[dR](T)[sP].[dR](T)[sP]. | | | |
| | | [dR](C)[sP].[LR]([5meC])[sP].[LR]([5meC]) | | | |
| 1810 | 1810_34 | [LR](T)[sP].[LR](A)[sP].[dR](C)[sP].[dR](A)[sP].[dR](C)[sP].[LR](T)[sP].[dR](T)[sP]. | 20.3 | | 19.9 |
| | | [dR](T)[sP].[dR](T)[sP].[dR](A)[sP].[dR](C)[sP].[dR](A)[sP].[LR](T)[sP].[dR](T)[sP]. | | | |
| | | [dR](C)[sP].[LR]([5meC])[sP].[LR]([5meC]) | | | |
| 1810 | 1810_35 | [LR](T)[sP].[LR](A)[sP].[dR](C)[sP].[dR](A)[sP].[dR](C)[sP].[LR](T)[sP].[dR](T)[sP]. | 5.93 | | 11.1 |
| | | [dR](T)[sP].[dR](T)[sP].[dR](A)[sP].[dR](C)[sP].[dR](A)[sP].[dR](T)[sP].[LR](T)[sP]. | | | |
| | | [dR](C)[sP].[LR]([5meC])[sP].[LR]([5meC]) | | | |
| 1810 | 1810_36 | [LR](T)[sP].[LR](A)[sP].[dR](C)[sP].[dR](A)[sP].[LR]([5meC])[sP].[dR](T)[sP].[dR](T)[sP]. | 12.4 | | 15.1 |
| | | [dR](T)[sP].[dR](T)[sP].[dR](A)[sP].[dR](C)[sP].[dR](A)[sP].[dR](T)[sP].[dR](T)[sP]. | | | |
| | | [dR](C)[sP].[LR]([5meC])[sP].[LR]([5meC]) | | | |
| 1810 | 1810_37 | [LR](T)[sP].[LR](A)[sP].[dR](C)[sP].[dR](A)[sP].[dR](C)[sP].[dR](T)[sP].[LR](T)[sP]. | 29.5 | | 31.7 |
| | | [dR](T)[sP].[LR](T)[sP].[dR](A)[sP].[dR](C)[sP].[dR](A)[sP].[dR](T)[sP].[dR](T)[sP]. | | | |
| | | [dR](C)[sP].[LR]([5meC])[sP].[LR]([5meC]) | | | |
| 1810 | 1810_38 | [LR](T)[sP].[LR](A)[sP].[dR](C)[sP].[dR](A)[sP].[LR]([5meC])[sP].[dR](T)[sP].[dR](T)[sP]. | 16 | | 19.3 |
| | | [dR](T)[sP].[dR](T)[sP].[dR](A)[sP].[dR](C)[sP].[LR](A)[sP].[dR](T)[sP].[dR](T)[sP]. | | | |
| | | [dR](C)[sP].[LR]([5meC])[sP].[LR]([5meC]) | | | |
| 1810 | 1810_39 | [LR](T)[sP].[LR](A)[sP].[dR](C)[sP].[LR](A)[sP].[dR](C)[sP].[LR](T)[sP].[dR](T)[sP]. | 8.06 | | 10.2 |
| | | [dR](T)[sP].[dR](T)[sP].[dR](A)[sP].[dR](C)[sP].[dR](A)[sP].[dR](T)[sP].[LR](T)[sP]. | | | |
| | | [dR](C)[sP].[LR]([5meC])[sP].[LR]([5meC]) | | | |
| 1810 | 1810_40 | [LR](T)[sP].[LR](A)[sP].[dR](C)[sP].[dR](A)[sP].[dR](C)[sP].[dR](T)[sP].[dR](T)[sP]. | 50.4 | | 45.5 |
| | | [dR](T)[sP].[dR](T)[sP].[dR](A)[sP].[LR]([5meC])[sP].[dR](A)[sP].[dR](T)[sP]. | | | |
| | | [LR](T)[sP].[dR](C)[sP].[LR]([5meC])[sP].[LR]([5meC]) | | | |
| 1810 | 1810_41 | [LR](T)[sP].[LR](A)[sP].[dR](C)[sP].[dR](A)[sP].[dR](C)[sP].[dR](T)[sP].[LR](T)[sP]. | 27.6 | | 24.4 |
| | | [LR](T)[sP].[dR](T)[sP].[dR](A)[sP].[dR](C)[sP].[dR](A)[sP].[dR](T)[sP].[dR](T)[sP]. | | | |
| | | [dR](C)[sP].[LR]([5meC])[sP].[LR]([5meC]) | | | |
| 1810 | 1810_42 | [LR](T)[sP].[LR](A)[sP].[dR](C)[sP].[LR](A)[sP].[dR](C)[sP].[LR](T)[sP].[dR](T)[sP]. | 16.5 | | 19.6 |
| | | [dR](T)[sP].[dR](T)[sP].[dR](A)[sP].[dR](C)[sP].[dR](A)[sP].[LR](T)[sP].[dR](T)[sP]. | | | |
| | | [dR](C)[sP].[LR]([5meC])[sP].[LR]([5meC]) | | | |
| 1810 | 1810_43 | [LR](T)[sP].[LR](A)[sP].[dR](C)[sP].[dR](A)[sP].[dR](C)[sP].[dR](T)[sP].[dR](T)[sP]. | 57 | | 47.7 |
| | | [dR](T)[sP].[LR](T)[sP].[dR](A)[sP].[dR](C)[sP].[dR](A)[sP].[LR](T)[sP].[dR](T)[sP]. | | | |
| | | [dR](C)[sP].[LR]([5meC])[sP].[LR]([5meC]) | | | |
| 1810 | 1810_44 | [LR](T)[sP].[LR](A)[sP].[dR](C)[sP].[dR](A)[sP].[dR](C)[sP].[dR](T)[sP].[dR](T)[sP]. | 56.9 | | 57.2 |
| | | [dR](T)[sP].[dR](T)[sP].[dR](A)[sP].[LR]([5meC])[sP].[dR](A)[sP].[LR](T)[sP].[dR](T)[sP]. | | | |
| | | [dR](C)[sP].[LR]([5meC])[sP].[LR]([5meC]) | | | |
| 1810 | 1810_45 | [LR](T)[sP].[LR](A)[sP].[dR](C)[sP].[dR](A)[sP].[dR](C)[sP].[dR](T)[sP].[dR](T)[sP]. | 15.2 | | 18.6 |
| | | [dR](T)[sP].[LR](T)[sP].[dR](A)[sP].[dR](C)[sP].[dR](A)[sP].[dR](T)[sP].[LR](T)[sP]. | | | |
| | | [dR](C)[sP].[LR]([5meC])[sP].[LR]([5meC]) | | | |
| 1810 | 1810_46 | [LR](T)[sP].[LR](A)[sP].[LR]([5meC])[sP].[dR](A)[sP].[mR](C)[sP].[dR](T)[sP].[dR](T)[sP]. | 13.5 | 6.15 | 19.7 |
| | | [dR](T)[sP].[dR](T)[sP].[dR](A)[sP].[dR](C)[sP].[dR](A)[sP].[dR](T)[sP].[dR](T)[sP]. | | | |
| | | [dR](C)[sP].[LR]([5meC])[sP].[LR]([5meC]) | | | |
| 1810 | 1810_47 | [LR](T)[sP].[LR](A)[sP].[LR]([5meC])[sP].[mR](A)[sP].[dR](C)[sP].[dR](T)[sP].[dR](T)[sP]. | 10.9 | | 21.4 |
| | | [dR](T)[sP].[dR](T)[sP].[dR](A)[sP].[dR](C)[sP].[dR](A)[sP].[dR](T)[sP].[dR](T)[sP]. | | | |
| | | [dR](C)[sP].[LR]([5meC])[sP].[LR]([5meC]) | | | |
| 1810 | 1810_48 | [LR](T)[sP].[LR](A)[sP].[LR]([5meC])[sP].[dR](A)[sP].[dR](C)[sP].[mR](U)[sP].[dR](T)[sP]. | 17 | | 22.4 |
| | | [dR](T)[sP].[dR](T)[sP].[dR](A)[sP].[dR](C)[sP].[dR](A)[sP].[dR](T)[sP].[dR](T)[sP]. | | | |
| | | [dR](C)[sP].[LR]([5meC])[sP].[LR]([5meC]) | | | |
| 1810 | 1810_49 | [LR](T)[sP].[LR](A)[sP].[LR]([5meC])[sP].[dR](A)[sP].[mR](C)[sP].[dR](T)[sP].[dR](T)[sP]. | 16.2 | | 19.8 |
| | | [dR](T)[sP].[dR](T)[sP].[dR](A)[sP].[dR](C)[sP].[LR](A)[sP].[dR](T)[sP].[dR](T)[sP]. | | | |
| | | [dR](C)[sP].[LR]([5meC])[sP].[LR]([5meC]) | | | |
| 1812 | 1812_2 | [LR](T)[sP].[LR](G)[sP].[dR](T)[sP].[LR](A)[sP].[dR](C)[sP].[dR](A)[sP].[dR](C)[sP]. | | 13.8 | 15.1 |
| | | [dR](T)[sP].[dR](T)[sP].[dR](T)[sP].[dR](T)[sP].[dR](A)[sP].[dR](C)[sP].[dR](A)[sP]. | | | |
| | | [dR](T)[sP].[LR](T)[sP].[LR]([5meC])[sP].[LR]([5meC]) | | | |
| 1812 | 1812_3 | [LR](T)[sP].[LR](G)[sP].[dR](T)[sP].[dR](A)[sP].[dR](C)[sP].[LR](A)[sP].[dR](C)[sP]. | | 2.43 | 12 |
| | | [dR](T)[sP].[dR](T)[sP].[dR](T)[sP].[dR](T)[sP].[dR](A)[sP].[dR](C)[sP].[dR](A)[sP]. | | | |
| | | [dR](T)[sP].[LR](T)[sP].[LR]([5meC])[sP].[LR]([5meC]) | | | |
| 1812 | 1812_4 | [LR](T)[sP].[LR](G)[sP].[dR](T)[sP].[dR](A)[sP].[dR](C)[sP].[dR](A)[sP].[dR](C)[sP]. | | 4.36 | 19.3 |
| | | [LR](T)[sP].[dR](T)[sP].[dR](T)[sP].[dR](T)[sP].[dR](A)[sP].[dR](C)[sP].[dR](A)[sP]. | | | |
| | | [dR](T)[sP].[LR](T)[sP].[LR]([5meC])[sP].[LR]([5meC]) | | | |
| 1812 | 1812_5 | [LR](T)[sP].[LR](G)[sP].[dR](T)[sP].[dR](A)[sP].[dR](C)[sP].[dR](A)[sP].[dR](C)[sP]. | | 5.19 | 22.2 |
| | | [dR](T)[sP].[LR](T)[sP].[dR](T)[sP].[dR](T)[sP].[dR](A)[sP].[dR](C)[sP].[dR](A)[sP]. | | | |
| | | [dR](T)[sP].[LR](T)[sP].[LR]([5meC])[sP].[LR]([5meC]) | | | |
| 1812 | 1812_6 | [LR](T)[sP].[LR](G)[sP].[dR](T)[sP].[dR](A)[sP].[dR](C)[sP].[dR](A)[sP].[dR](C)[sP]. | | 13.4 | 29.6 |
| | | [dR](T)[sP].[dR](T)[sP].[LR](T)[sP].[dR](T)[sP].[dR](A)[sP].[dR](C)[sP].[dR](A)[sP]. | | | |
| | | [dR](T)[sP].[LR](T)[sP].[LR]([5meC])[sP].[LR]([5meC]) | | | |
| 1812 | 1812_7 | [LR](T)[sP].[LR](G)[sP].[dR](T)[sP].[dR](A)[sP].[dR](C)[sP].[dR](A)[sP].[dR](C)[sP]. | | 16.6 | 31.6 |
| | | [dR](T)[sP].[dR](T)[sP].[dR](T)[sP].[dR](T)[sP].[LR](A)[sP].[dR](C)[sP].[dR](A)[sP]. | | | |
| | | [dR](T)[sP].[LR](T)[sP].[LR]([5meC])[sP].[LR]([5meC]) | | | |
| 1812 | 1812_8 | [LR](T)[sP].[LR](G)[sP].[dR](T)[sP].[dR](A)[sP].[dR](C)[sP].[dR](A)[sP].[dR](C)[sP]. | | 9.81 | 21.6 |
| | | [dR](T)[sP].[dR](T)[sP].[dR](T)[sP].[dR](T)[sP].[dR](A)[sP].[dR](C)[sP].[LR](A)[sP]. | | | |
| | | [dR](T)[sP].[LR](T)[sP].[LR]([5meC])[sP].[LR]([5meC]) | | | |
| 1812 | 1812_9 | [LR](T)[sP].[LR](G)[sP].[dR](T)[sP].[mR](A)[sP].[dR](C)[sP].[dR](A)[sP].[dR](C)[sP]. | | 8.18 | 20.1 |
| | | [dR](T)[sP].[dR](T)[sP].[dR](T)[sP].[dR](T)[sP].[dR](A)[sP].[dR](C)[sP].[dR](A)[sP]. | | | |
| | | [dR](T)[sP].[LR](T)[sP].[LR]([5meC])[sP].[LR]([5meC]) | | | |
| 1812 | 1812_10 | [LR](T)[sP].[LR](G)[sP].[dR](T)[sP].[dR](A)[sP].[dR](C)[sP].[dR](A)[sP].[mR](C)[sP]. | | 7.19 | 21.5 |
| | | [dR](T)[sP].[dR](T)[sP].[dR](T)[sP].[dR](T)[sP].[dR](A)[sP].[dR](C)[sP].[dR](A)[sP]. | | | |
| | | [dR](T)[sP].[LR](T)[sP].[LR]([5meC])[sP].[LR]([5meC]) | | | |
| 1812 | 1812_11 | [LR](T)[sP].[LR](G)[sP].[mR](U)[sP].[dR](A)[sP].[dR](C)[sP].[dR](A)[sP].[dR](C)[sP]. | | 9.23 | 20.2 |
| | | [dR](T)[sP].[dR](T)[sP].[dR](T)[sP].[dR](T)[sP].[dR](A)[sP].[dR](C)[sP].[dR](A)[sP]. | | | |
| | | [dR](T)[sP].[LR](T)[sP].[LR]([5meC])[sP].[LR]([5meC]) | | | |
| 1812 | 1812_12 | [LR](T)[sP].[LR](G)[sP].[dR](T)[sP].[dR](A)[sP].[dR](C)[sP].[mR](A)[sP].[dR](C)[sP]. | | 8.01 | 23 |
| | | [dR](T)[sP].[dR](T)[sP].[dR](T)[sP].[dR](T)[sP].[dR](A)[sP].[dR](C)[sP].[dR](A)[sP]. | | | |
| | | [dR](T)[sP].[LR](T)[sP].[LR]([5meC])[sP].[LR]([5meC]) | | | |
| 1812 | 1812_13 | [LR](T)[sP].[LR](G)[sP].[dR](T)[sP].[dR](A)[sP].[mR](C)[sP].[dR](A)[sP].[dR](C)[sP]. | 6.45 | 4.65 | 16.8 |
| | | [dR](T)[sP].[dR](T)[sP].[dR](T)[sP].[dR](T)[sP].[dR](A)[sP].[dR](C)[sP].[dR](A)[sP]. | | | |
| | | [dR](T)[sP].[LR](T)[sP].[LR]([5meC])[sP].[LR]([5meC]) | | | |
| 1812 | 1812_14 | [LR](T)[sP].[LR](G)[sP].[dR](T)[sP].[LR](A)[sP].[mR](C)[sP].[dR](A)[sP].[dR](C)[sP]. | 18.6 | | 17.9 |
| | | [dR](T)[sP].[dR](T)[sP].[dR](T)[sP].[dR](T)[sP].[dR](A)[sP].[dR](C)[sP].[dR](A)[sP]. | | | |
| | | [dR](T)[sP].[LR](T)[sP].[LR]([5meC])[sP].[LR]([5meC]) | | | |
| 1812 | 1812_15 | [LR](T)[sP].[LR](G)[sP].[dR](T)[sP].[dR](A)[sP].[mR](C)[sP].[LR](A)[sP].[dR](C)[sP]. | 2.72 | | 7.92 |
| | | [dR](T)[sP].[dR](T)[sP].[dR](T)[sP].[dR](T)[sP].[dR](A)[sP].[dR](C)[sP].[dR](A)[sP]. | | | |
| | | [dR](T)[sP].[LR](T)[sP].[LR]([5meC])[sP].[LR]([5meC]) | | | |
| 1813 | 1813_2 | [LR]([5meC])[sP].[LR](T)[sP].[LR](G)[sP].[dR](T)[sP].[LR](A)[sP].[dR](C)[sP].[dR](A)[sP]. | | 24.1 | 21.4 |
| | | [dR](C)[sP].[dR](T)[sP].[dR](T)[sP].[dR](T)[sP].[dR](T)[sP].[dR](A)[sP].[dR](C)[sP]. | | | |
| | | [dR](A)[sP].[LR](T)[sP].[LR](T)[sP].[LR]([5meC]) | | | |
| 1813 | 1813_3 | [LR]([5meC])[sP].[LR](T)[sP].[LR](G)[sP].[dR](T)[sP].[dR](A)[sP].[LR]([5meC])[sP]. | | 33.4 | 26.3 |
| | | [dR](A)[sP].[dR](C)[sP].[dR](T)[sP].[dR](T)[sP].[dR](T)[sP].[dR](T)[sP].[dR](A)[sP]. | | | |
| | | [dR](C)[sP].[dR](A)[sP].[LR](T)[sP].[LR](T)[sP].[LR]([5meC]) | | | |
| 1813 | 1813_4 | [LR]([5meC])[sP].[LR](T)[sP].[LR](G)[sP].[dR](T)[sP].[dR](A)[sP].[dR](C)[sP].[LR](A)[sP]. | | 4.64 | 16.8 |
| | | [dR](C)[sP].[dR](T)[sP].[dR](T)[sP].[dR](T)[sP].[dR](T)[sP].[dR](A)[sP].[dR](C)[sP]. | | | |
| | | [dR](A)[sP].[LR](T)[sP].[LR](T)[sP].[LR]([5meC]) | | | |
| 1813 | 1813_5 | [LR]([5meC])[sP].[LR](T)[sP].[LR](G)[sP].[dR](T)[sP].[dR](A)[sP].[dR](C)[sP].[dR](A)[sP]. | | 4.92 | 19 |
| | | [dR](C)[sP].[LR](T)[sP].[dR](T)[sP].[dR](T)[sP].[dR](T)[sP].[dR](A)[sP].[dR](C)[sP]. | | | |
| | | [dR](A)[sP].[LR](T)[sP].[LR](T)[sP].[LR]([5meC]) | | | |
| 1813 | 1813_6 | [LR]([5meC])[sP].[LR](T)[sP].[LR](G)[sP].[dR](T)[sP].[dR](A)[sP].[dR](C)[sP].[dR](A)[sP]. | | 8.3 | 21.1 |
| | | [dR](C)[sP].[dR](T)[sP].[LR](T)[sP].[dR](T)[sP].[dR](T)[sP].[dR](A)[sP].[dR](C)[sP]. | | | |
| | | [dR](A)[sP].[LR](T)[sP].[LR](T)[sP].[LR]([5meC]) | | | |
| 1813 | 1813_7 | [LR]([5meC])[sP].[LR](T)[sP].[LR](G)[sP].[dR](T)[sP].[dR](A)[sP].[dR](C)[sP].[dR](A)[sP]. | | 25.4 | 40.5 |
| | | [dR](C)[sP].[dR](T)[sP].[dR](T)[sP].[LR](T)[sP].[dR](T)[sP].[dR](A)[sP].[dR](C)[sP]. | | | |
| | | [dR](A)[sP].[LR](T)[sP].[LR](T)[sP].[LR]([5meC]) | | | |
| 1813 | 1813_8 | [LR]([5meC])[sP].[LR](T)[sP].[LR](G)[sP].[dR](T)[sP].[dR](A)[sP].[dR](C)[sP].[dR](A)[sP]. | | 36.2 | 43.7 |
| | | [dR](C)[sP].[dR](T)[sP].[dR](T)[sP].[dR](T)[sP].[LR](T)[sP].[dR](A)[sP].[dR](C)[sP]. | | | |
| | | [dR](A)[sP].[LR](T)[sP].[LR](T)[sP].[LR]([5meC]) | | | |
| 1813 | 1813_9 | [LR]([5meC])[sP].[LR](T)[sP].[LR](G)[sP].[dR](T)[sP].[dR](A)[sP].[dR](C)[sP].[dR](A)[sP]. | | 37.8 | 43.4 |
| | | [dR](C)[sP].[dR](T)[sP].[dR](T)[sP].[dR](T)[sP].[dR](T)[sP].[LR](A)[sP].[dR](C)[sP]. | | | |
| | | [dR](A)[sP].[LR](T)[sP].[LR](T)[sP].[LR]([5meC]) | | | |
| 1813 | 1813_10 | [LR]([5meC])[sP].[LR](T)[sP].[LR](G)[sP].[dR](T)[sP].[dR](A)[sP].[dR](C)[sP].[dR](A)[sP]. | | 43 | 46.6 |
| | | [dR](C)[sP].[dR](T)[sP].[dR](T)[sP].[dR](T)[sP].[dR](T)[sP].[dR](A)[sP].[LR]([5meC])[sP]. | | | |
| | | [dR](A)[sP].[LR](T)[sP].[LR](T)[sP].[LR]([5meC]) | | | |
| 1813 | 1813_11 | [LR]([5meC])[sP].[LR](T)[sP].[LR](G)[sP].[dR](T)[sP].[dR](A)[sP].[dR](C)[sP].[dR](A)[sP]. | | 9.79 | 22.5 |
| | | [dR](C)[sP].[dR](T)[sP].[dR](T)[sP].[dR](T)[sP].[dR](T)[sP].[dR](A)[sP].[dR](C)[sP]. | | | |
| | | [LR](A)[sP].[LR](T)[sP].[LR](T)[sP].[LR]([5meC]) | | | |
| 1813 | 1813_12 | [LR]([5meC])[sP].[LR](T)[sP].[LR](G)[sP].[dR](T)[sP].[mR](A)[sP].[dR](C)[sP].[dR](A)[sP]. | | 7.9 | 19.4 |
| | | [dR](C)[sP].[dR](T)[sP].[dR](T)[sP].[dR](T)[sP].[dR](T)[sP].[dR](A)[sP].[dR](C)[sP]. | | | |
| | | [dR](A)[sP].[LR](T)[sP].[LR](T)[sP].[LR]([5meC]) | | | |
| 1813 | 1813_13 | [LR]([5meC])[sP].[LR](T)[sP].[LR](G)[sP].[mR](U)[sP].[dR](A)[sP].[dR](C)[sP].[dR](A)[sP]. | | 9.34 | 19.4 |
| | | [dR](C)[sP].[dR](T)[sP].[dR](T)[sP].[dR](T)[sP].[dR](T)[sP].[dR](A)[sP].[dR](C)[sP]. | | | |
| | | [dR](A)[sP].[LR](T)[sP].[LR](T)[sP].[LR]([5meC]) | | | |
| 1813 | 1813_14 | [LR]([5meC])[sP].[LR](T)[sP].[LR](G)[sP].[dR](T)[sP].[dR](A)[sP].[mR](C)[sP].[dR](A)[sP]. | | 4.65 | 18.5 |
| | | [dR](C)[sP].[dR](T)[sP].[dR](T)[sP].[dR](T)[sP].[dR](T)[sP].[dR](A)[sP].[dR](C)[sP]. | | | |
| | | [dR](A)[sP].[LR](T)[sP].[LR](T)[sP].[LR]([5meC]) | | | |
| 1813 | 1813_15 | [LR]([5meC])[sP].[LR](T)[sP].[LR](G)[sP].[dR](T)[sP].[dR](A)[sP].[mR](C)[sP].[mR](A)[sP]. | | 5.04 | 17.5 |
| | | [dR](C)[sP].[dR](T)[sP].[dR](T)[sP].[dR](T)[sP].[dR](T)[sP].[dR](A)[sP].[dR](C)[sP]. | | | |
| | | [dR](A)[sP].[LR](T)[sP].[LR](T)[sP].[LR]([5meC]) | | | |
| 1813 | 1813_16 | [LR]([5meC])[sP].[LR](T)[sP].[LR](G)[sP].[dR](T)[sP].[dR](A)[sP].[mR](C)[sP].[dR](A)[sP]. | | 5.27 | 19.1 |
| | | [mR](C)[sP].[dR](T)[sP].[dR](T)[sP].[dR](T)[sP].[dR](T)[sP].[dR](A)[sP].[dR](C)[sP]. | | | |
| | | [dR](A)[sP].[LR](T)[sP].[LR](T)[sP].[LR]([5meC]) | | | |
| 1813 | 1813_17 | [LR]([5meC])[sP].[LR](T)[sP].[LR](G)[sP].[dR](T)[sP].[dR](A)[sP].[mR](C)[sP].[dR](A)[sP]. | | 7.42 | 21.1 |
| | | [dR](C)[sP].[mR](U)[sP].[dR](T)[sP].[dR](T)[sP].[dR](T)[sP].[dR](A)[sP].[dR](C)[sP]. | | | |
| | | [dR](A)[sP].[LR](T)[sP].[LR](T)[sP].[LR]([5meC]) | | | |
| 1814 | 1814_2 | [LR](A)[sP].[LR](T)[sP].[LR]([5meC])[sP].[dR](T)[sP].[dR](T)[sP].[dR](A)[sP].[dR](T)[sP]. | | 16.3 | 33.1 |
| | | [dR](T)[sP].[dR](T)[sP].[dR](A)[sP].[dR](C)[sP].[dR](A)[sP].[LR](T)[sP].[dR](C)[sP]. | | | |
| | | [LR](T)[sP].[dR](T)[sP].[LR]([5meC])[sP].[LR]([5meC]) | | | |
| 1814 | 1814_3 | [LR](A)[sP].[LR](T)[sP].[dR](C)[sP].[dR](T)[sP].[dR](T)[sP].[dR](A)[sP].[LR](T)[sP]. | | 41.8 | 42.5 |
| | | [LR](T)[sP].[LR](T)[sP].[dR](A)[sP].[dR](C)[sP].[dR](A)[sP].[dR](T)[sP].[dR](C)[sP]. | | | |
| | | [dR](T)[sP].[dR](T)[sP].[LR]([5meC])[sP].[LR]([5meC]) | | | |
| 1814 | 1814_4 | [LR](A)[sP].[LR](T)[sP].[dR](C)[sP].[dR](T)[sP].[dR](T)[sP].[dR](A)[sP].[dR](T)[sP]. | | 33.4 | 37.7 |
| | | [LR](T)[sP].[LR](T)[sP].[dR](A)[sP].[dR](C)[sP].[dR](A)[sP].[dR](T)[sP].[dR](C)[sP]. | | | |
| | | [dR](T)[sP].[LR](T)[sP].[LR]([5meC])[sP].[LR]([5meC]) | | | |
| 1814 | 1814_5 | [LR](A)[sP].[LR](T)[sP].[dR](C)[sP].[LR](T)[sP].[dR](T)[sP].[dR](A)[sP].[dR](T)[sP]. | | 22.4 | 32.7 |
| | | [dR](T)[sP].[dR](T)[sP].[dR](A)[sP].[dR](C)[sP].[dR](A)[sP].[dR](T)[sP].[dR](C)[sP]. | | | |
| | | [dR](T)[sP].[LR](T)[sP].[LR]([5meC])[sP].[LR]([5meC]) | | | |
| 1814 | 1814_6 | [LR](A)[sP].[LR](T)[sP].[dR](C)[sP].[LR](T)[sP].[LR](T)[sP].[dR](A)[sP].[dR](T)[sP]. | | 26.6 | 31.6 |
| | | [dR](T)[sP].[dR](T)[sP].[dR](A)[sP].[dR](C)[sP].[LR](A)[sP].[LR](T)[sP].[dR](C)[sP]. | | | |
| | | [dR](T)[sP].[dR](T)[sP].[LR]([5meC])[sP].[LR]([5meC]) | | | |
| 1814 | 1814_7 | [LR](A)[sP].[LR](T)[sP].[dR](C)[sP].[dR](T)[sP].[dR](T)[sP].[dR](A)[sP].[dR](T)[sP]. | | 25.4 | 34.9 |
| | | [dR](T)[sP].[dR](T)[sP].[dR](A)[sP].[dR](C)[sP].[LR](A)[sP].[dR](T)[sP].[LR]([5meC])[sP]. | | | |
| | | [dR](T)[sP].[dR](T)[sP].[LR]([5meC])[sP].[LR]([5meC]) | | | |
| 1815 | 1815_2 | [LR](G)[sP].[LR](A)[sP].[LR](A)[sP].[LR](T)[sP].[dR](C)[sP].[LR](T)[sP].[dR](T)[sP]. | | 90.6 | 80.3 |
| | | [dR](A)[sP].[dR](T)[sP].[LR](T)[sP].[dR](T)[sP].[dR](A)[sP].[dR](C)[sP].[dR](A)[sP]. | | | |
| | | [dR](T)[sP].[dR](C)[sP].[LR](T)[sP].[LR](T)[sP].[LR]([5meC]) | | | |
| 1815 | 1815_3 | [LR](G)[sP].[LR](A)[sP].[LR](A)[sP].[LR](T)[sP].[dR](C)[sP].[dR](T)[sP].[dR](T)[sP]. | | 71.2 | 64.3 |
| | | [LR](A)[sP].[dR](T)[sP].[dR](T)[sP].[dR](T)[sP].[dR](A)[sP].[dR](C)[sP].[dR](A)[sP]. | | | |
| | | [LR](T)[sP].[dR](C)[sP].[LR](T)[sP].[LR](T)[sP].[LR]([5meC]) | | | |
| 1815 | 1815_4 | [LR](G)[sP].[LR](A)[sP].[LR](A)[sP].[LR](T)[sP].[dR](C)[sP].[dR](T)[sP].[dR](T)[sP]. | | 81 | 72.1 |
| | | [dR](A)[sP].[dR](T)[sP].[dR](T)[sP].[dR](T)[sP].[dR](A)[sP].[LR]([5meC])[sP].[dR](A)[sP]. | | | |
| | | [dR](T)[sP].[dR](C)[sP].[LR](T)[sP].[LR](T)[sP].[LR]([5meC]) | | | |
| 1815 | 1815_5 | [LR](G)[sP].[LR](A)[sP].[dR](A)[sP].[dR](T)[sP].[LR]([5meC])[sP].[LR](T)[sP].[dR](T)[sP]. | | 45.5 | 46.8 |
| | | [dR](A)[sP].[LR](T)[sP].[LR](T)[sP].[dR](T)[sP].[dR](A)[sP].[dR](C)[sP].[dR](A)[sP]. | | | |
| | | [dR](T)[sP].[dR](C)[sP].[dR](T)[sP].[LR](T)[sP].[LR]([5meC]) | | | |
| 1815 | 1815_6 | [LR](G)[sP].[LR](A)[sP].[dR](A)[sP].[LR](T)[sP].[LR]([5meC])[sP].[dR](T)[sP].[LR](T)[sP]. | | 55.7 | 51.7 |
| | | [dR](A)[sP].[dR](T)[sP].[dR](T)[sP].[dR](T)[sP].[dR](A)[sP].[dR](C)[sP].[dR](A)[sP]. | | | |
| | | [dR](T)[sP].[dR](C)[sP].[LR](T)[sP].[LR](T)[sP].[LR]([5meC]) | | | |
| 1815 | 1815_7 | [LR](G)[sP].[LR](A)[sP].[LR](A)[sP].[dR](T)[sP].[LR]([5meC])[sP].[dR](T)[sP].[dR](T)[sP]. | | 84.8 | 62.7 |
| | | [dR](A)[sP].[dR](T)[sP].[dR](T)[sP].[dR](T)[sP].[LR](A)[sP].[LR]([5meC])[sP].[dR](A)[sP]. | | | |
| | | [dR](T)[sP].[dR](C)[sP].[dR](T)[sP].[LR](T)[sP].[LR]([5meC]) | | | |
| 1815 | 1815_8 | [LR](G)[sP].[LR](A)[sP].[dR](A)[sP].[dR](T)[sP].[LR]([5meC])[sP].[LR](T)[sP].[dR](T)[sP]. | | 35.6 | 33.4 |
| | | [dR](A)[sP].[dR](T)[sP].[dR](T)[sP].[dR](T)[sP].[dR](A)[sP].[dR](C)[sP].[LR](A)[sP]. | | | |
| | | [dR](T)[sP].[LR]([5meC])[sP].[dR](T)[sP].[LR](T)[sP].[LR]([5meC]) | | | |
| 1815 | 1815_9 | [LR](G)[sP].[LR](A)[sP].[LR](A)[sP].[dR](T)[sP].[LR]([5meC])[sP].[dR](T)[sP].[dR](T)[sP]. | | 55.1 | 58.5 |
| | | [dR](A)[sP].[dR](T)[sP].[dR](T)[sP].[dR](T)[sP].[dR](A)[sP].[dR](C)[sP].[dR](A)[sP]. | | | |
| | | [LR](T)[sP].[dR](C)[sP].[LR](T)[sP].[LR](T)[sP].[LR]([5meC]) | | | |
| 1816 | 1816_93 | [LR](G)[sP].[LR](A)[sP].[LR](A)[sP].[LR](T)[sP].[dR](C)[sP].[LR](T)[sP].[LR](T)[sP]. | | 73.4 | 53.4 |
| | | [LR](A)[sP].[dR](T)[sP].[dR](T)[sP].[dR](T)[sP].[dR](A)[sP].[dR](C)[sP].[dR](A)[sP]. | | | |
| | | [dR](T)[sP].[dR](C)[sP].[LR](T)[sP].[LR](T) | | | |
| 1816 | 1816_94 | [LR](G)[sP].[LR](A)[sP].[LR](A)[sP].[LR](T)[sP].[dR](C)[sP].[dR](T)[sP].[dR](T)[sP]. | | 83.1 | 80.4 |
| | | [dR](A)[sP].[dR](T)[sP].[dR](T)[sP].[dR](T)[sP].[LR](A)[sP].[LR]([5meC])[sP].[LR](A)[sP]. | | | |
| | | [LR](T)[sP].[dR](C)[sP].[LR](T)[sP].[LR](T) | | | |
| 1816 | 1816_95 | [LR](G)[sP].[LR](A)[sP].[dR](A)[sP].[dR](T)[sP].[dR](C)[sP].[LR](T)[sP].[LR](T)[sP]. | | 24.7 | 40.9 |
| | | [dR](A)[sP].[dR](T)[sP].[dR](T)[sP].[dR](T)[sP].[dR](A)[sP].[dR](C)[sP].[dR](A)[sP]. | | | |
| | | [LR](T)[sP].[LR]([5meC])[sP].[LR](T)[sP].[LR](T) | | | |
| 1817 | 1817_2 | [LR](T)[sP].[LR](G)[sP].[dR](A)[sP].[LR](A)[sP].[LR](T)[sP].[LR]([5meC])[sP].[dR](T)[sP]. | | 88.7 | 65.2 |
| | | [LR](T)[sP].[dR](A)[sP].[dR](T)[sP].[dR](T)[sP].[dR](T)[sP].[dR](A)[sP].[dR](C)[sP]. | | | |
| | | [LR](A)[sP].[dR](T)[sP].[LR]([5meC])[sP].[LR](T) | | | |
| 1817 | 1817_3 | [LR](T)[sP].[LR](G)[sP].[LR](A)[sP].[dR](A)[sP].[dR](T)[sP].[dR](C)[sP].[dR](T)[sP]. | | 80.7 | 71 |
| | | [dR](T)[sP].[dR](A)[sP].[dR](T)[sP].[LR](T)[sP].[dR](T)[sP].[LR](A)[sP].[LR]([5meC])[sP]. | | | |
| | | [LR](A)[sP].[dR](T)[sP].[LR]([5meC])[sP].[LR](T) | | | |
| 1817 | 1817_4 | [LR](T)[sP].[LR](G)[sP].[dR](A)[sP].[LR](A)[sP].[dR](T)[sP].[LR]([5meC])[sP].[dR](T)[sP]. | | 82.9 | 70.2 |
| | | [LR](T)[sP].[dR](A)[sP].[dR](T)[sP].[dR](T)[sP].[dR](T)[sP].[dR](A)[sP].[dR](C)[sP]. | | | |
| | | [LR](A)[sP].[LR](T)[sP].[LR]([5meC])[sP].[LR](T) | | | |
| 1817 | 1817_5 | [LR](T)[sP].[LR](G)[sP].[LR](A)[sP].[dR](A)[sP].[dR](T)[sP].[dR](C)[sP].[LR](T)[sP]. | | 85.4 | 75.8 |
| | | [dR](T)[sP].[dR](A)[sP].[dR](T)[sP].[dR](T)[sP].[dR](T)[sP].[dR](A)[sP].[LR]([5meC])[sP]. | | | |
| | | [dR](A)[sP].[LR](T)[sP].[LR]([5meC])[sP].[LR](T) | | | |
| 1817 | 1817_6 | [LR](T)[sP].[LR](G)[sP].[LR](A)[sP].[dR](A)[sP].[dR](T)[sP].[LR]([5meC])[sP].[dR](T)[sP]. | | 49.3 | 48.4 |
| | | [LR](T)[sP].[dR](A)[sP].[LR](T)[sP].[dR](T)[sP].[dR](T)[sP].[dR](A)[sP].[dR](C)[sP]. | | | |
| | | [dR](A)[sP].[dR](T)[sP].[LR]([5meC])[sP].[LR](T) | | | |
| 1817 | 1817_7 | [LR](T)[sP].[LR](G)[sP].[dR](A)[sP].[dR](A)[sP].[dR](T)[sP].[LR]([5meC])[sP].[LR](T)[sP]. | | 10.9 | 27.3 |
| | | [LR](T)[sP].[dR](A)[sP].[dR](T)[sP].[dR](T)[sP].[dR](T)[sP].[dR](A)[sP].[dR](C)[sP]. | | | |
| | | [dR](A)[sP].[LR](T)[sP].[LR]([5meC])[sP].[LR](T) | | | |
| 1823 | 1823_3 | [LR]([5meC])[sP].[LR](A)[sP].[dR](A)[sP].[dR](A)[sP].[LR](A)[sP].[dR](T)[sP].[dR](T)[sP]. | | 98.2 | 85.3 |
| | | [LR](A)[sP].[dR](C)[sP].[dR](T)[sP].[dR](T)[sP].[dR](C)[sP].[dR](T)[sP].[dR](T)[sP]. | | | |
| | | [LR](T)[sP].[dR](T)[sP].[dR](A)[sP].[LR](T)[sP].[LR]([5meC])[sP].[LR](A)[sP].[LR](T) | | | |
| 1823 | 1823_4 | [LR]([5meC])[sP].[LR](A)[sP].[dR](A)[sP].[LR](A)[sP].[dR](A)[sP].[dR](T)[sP].[LR](T)[sP]. | | 77.7 | 67.3 |
| | | [LR](A)[sP].[dR](C)[sP].[LR](T)[sP].[LR](T)[sP].[LR]([5meC])[sP].[dR](T)[sP].[dR](T)[sP]. | | | |
| | | [dR](T)[sP].[dR](T)[sP].[dR](A)[sP].[dR](T)[sP].[dR](C)[sP].[LR](A)[sP].[LR](T) | | | |
| 1823 | 1823_5 | [LR]([5meC])[sP].[LR](A)[sP].[LR](A)[sP].[LR](A)[sP].[dR](A)[sP].[dR](T)[sP].[dR](T)[sP]. | | 75.2 | 71.8 |
| | | [dR](A)[sP].[dR](C)[sP].[dR](T)[sP].[LR](T)[sP].[dR](C)[sP].[LR](T)[sP].[dR](T)[sP]. | | | |
| | | [dR](T)[sP].[dR](T)[sP].[LR](A)[sP].[dR](T)[sP].[LR]([5meC])[sP].[LR](A)[sP].[LR](T) | | | |
| 1823 | 1823_6 | [LR]([5meC])[sP].[LR](A)[sP].[dR](A)[sP].[dR](A)[sP].[dR](A)[sP].[dR](T)[sP].[dR](T)[sP]. | | 80.7 | 68.1 |
| | | [dR](A)[sP].[LR]([5meC])[sP].[dR](T)[sP].[LR](T)[sP].[LR]([5meC])[sP].[LR](T)[sP]. | | | |
| | | [dR](T)[sP].[dR](T)[sP].[dR](T)[sP].[LR](A)[sP].[dR](T)[sP].[dR](C)[sP].[LR](A)[sP].[LR](T) | | | |
| 1824 | 1824_3 | [LR]([5meC])[sP].[LR]([5meC])[sP].[dR](A)[sP].[dR](A)[sP].[LR](A)[sP].[dR](A)[sP]. | | 51.4 | 47.2 |
| | | [dR](T)[sP].[dR](T)[sP].[dR](A)[sP].[dR](C)[sP].[dR](T)[sP].[LR](T)[sP].[dR](C)[sP]. | | | |
| | | [LR](T)[sP].[LR](T)[sP].[LR](T)[sP].[dR](T)[sP].[dR](A)[sP].[dR](T)[sP].[LR]([5meC])[sP]. | | | |
| | | [LR](A) | | | |
| 1824 | 1824_4 | [LR]([5meC])[sP].[LR]([5meC])[sP].[dR](A)[sP].[dR](A)[sP].[dR](A)[sP].[dR](A)[sP]. | | 92.1 | 72.8 |
| | | [dR](T)[sP].[dR](T)[sP].[dR](A)[sP].[dR](C)[sP].[LR](T)[sP].[dR](T)[sP].[dR](C)[sP]. | | | |
| | | [dR](T)[sP].[LR](T)[sP].[dR](T)[sP].[dR](T)[sP].[dR](A)[sP].[dR](T)[sP].[LR]([5meC])[sP]. | | | |
| | | [LR](A) | | | |
| 1825 | 1825_2 | [LR](T)[sP].[LR]([5meC])[sP].[dR](C)[sP].[LR](A)[sP].[dR](A)[sP].[dR](A)[sP].[dR](A)[sP]. | | 58.4 | 44.8 |
| | | [LR](T)[sP].[dR](T)[sP].[LR](A)[sP].[dR](C)[sP].[LR](T)[sP].[dR](T)[sP].[dR](C)[sP]. | | | |
| | | [dR](T)[sP].[dR](T)[sP].[dR](T)[sP].[dR](T)[sP].[dR](A)[sP].[LR](T)[sP].[LR]([5meC]) | | | |
| 1825 | 1825_3 | [LR](T)[sP].[LR]([5meC])[sP].[dR](C)[sP].[LR](A)[sP].[dR](A)[sP].[LR](A)[sP].[dR](A)[sP]. | | 32.6 | 29.4 |
| | | [dR](T)[sP].[dR](T)[sP].[dR](A)[sP].[dR](C)[sP].[dR](T)[sP].[LR](T)[sP].[dR](C)[sP]. | | | |
| | | [dR](T)[sP].[dR](T)[sP].[dR](T)[sP].[dR](T)[sP].[LR](A)[sP].[LR](T)[sP].[LR]([5meC]) | | | |
| 1826 | 1826_2 | [LR](T)[sP].[LR]([5meC])[sP].[dR](C)[sP].[LR](A)[sP].[dR](A)[sP].[LR](A)[sP].[LR](A)[sP]. | | 101 | 100 |
| | | [LR](T)[sP].[dR](T)[sP].[dR](A)[sP].[dR](C)[sP].[dR](T)[sP].[dR](T)[sP].[dR](C)[sP]. | | | |
| | | [LR](T)[sP].[LR](T)[sP].[dR](T)[sP].[LR](T)[sP].[LR](A)[sP].[LR](T) | | | |
| 1826 | 1826_3 | [LR](T)[sP].[LR]([5meC])[sP].[dR](C)[sP].[LR](A)[sP].[dR](A)[sP].[LR](A)[sP].[dR](A)[sP]. | | 67.1 | 55.8 |
| | | [dR](T)[sP].[dR](T)[sP].[dR](A)[sP].[dR](C)[sP].[dR](T)[sP].[dR](T)[sP].[dR](C)[sP]. | | | |
| | | [dR](T)[sP].[LR](T)[sP].[dR](T)[sP].[LR](T)[sP].[LR](A)[sP].[LR](T) | | | |
| 1826 | 1826_4 | [LR](T)[sP].[LR]([5meC])[sP].[LR]([5meC])[sP].[dR](A)[sP].[dR](A)[sP].[LR](A)[sP]. | | 69.2 | 61.5 |
| | | [LR](A)[sP].[LR](T)[sP].[dR](T)[sP].[dR](A)[sP].[dR](C)[sP].[dR](T)[sP].[dR](T)[sP]. | | | |
| | | [dR](C)[sP].[dR](T)[sP].[dR](T)[sP].[dR](T)[sP].[LR](T)[sP].[LR](A)[sP].[LR](T) | | | |
| 1827 | 1827_2 | [LR]([5meC])[sP].[LR]([5meC])[sP].[LR](A)[sP].[LR](A)[sP].[dR](A)[sP].[dR](A)[sP]. | | 31.9 | 38.2 |
| | | [dR](T)[sP].[dR](T)[sP].[dR](A)[sP].[dR](C)[sP].[dR](T)[sP].[LR](T)[sP].[LR]([5meC])[sP]. | | | |
| | | [dR](T)[sP].[dR](T)[sP].[dR](T)[sP].[LR](T)[sP].[LR](A)[sP].[LR](T) | | | |
| 1828 | 1828_2 | [LR](T)[sP].[LR](T)[sP].[dR](C)[sP].[LR]([5meC])[sP].[LR](A)[sP].[dR](A)[sP].[dR](A)[sP]. | | 45.3 | 37.9 |
| | | [dR](A)[sP].[dR](T)[sP].[dR](T)[sP].[dR](A)[sP].[dR](C)[sP].[dR](T)[sP].[dR](T)[sP]. | | | |
| | | [LR]([5meC])[sP].[dR](T)[sP].[LR](T)[sP].[LR](T)[sP].[dR](T)[sP].[LR](A)[sP].[LR](T) | | | |
| 1828 | 1828_3 | [LR](T)[sP].[LR](T)[sP].[LR]([5meC])[sP].[dR](C)[sP].[LR](A)[sP].[LR](A)[sP].[dR](A)[sP]. | | 57.7 | 52.6 |
| | | [dR](A)[sP].[dR](T)[sP].[dR](T)[sP].[dR](A)[sP].[dR](C)[sP].[dR](T)[sP].[dR](T)[sP]. | | | |
| | | [dR](C)[sP].[dR](T)[sP].[dR](T)[sP].[dR](T)[sP].[LR](T)[sP].[LR](A)[sP].[LR](T) | | | |
| 1828 | 1828_4 | [LR](T)[sP].[LR](T)[sP].[dR](C)[sP].[LR]([5meC])[sP].[LR](A)[sP].[LR](A)[sP].[LR](A)[sP]. | | 64.2 | 59.5 |
| | | [dR](A)[sP].[dR](T)[sP].[dR](T)[sP].[dR](A)[sP].[dR](C)[sP].[dR](T)[sP].[dR](T)[sP]. | | | |
| | | [dR](C)[sP].[dR](T)[sP].[dR](T)[sP].[dR](T)[sP].[LR](T)[sP].[LR](A)[sP].[LR](T) | | | |
| 1830 | 1830_2 | [LR](T)[sP].[LR](T)[sP].[dR](C)[sP].[dR](C)[sP].[LR](A)[sP].[LR](A)[sP].[dR](A)[sP]. | | 56.2 | 45.6 |
| | | [dR](A)[sP].[dR](T)[sP].[dR](T)[sP].[dR](A)[sP].[dR](C)[sP].[dR](T)[sP].[dR](T)[sP]. | | | |
| | | [LR]([5meC])[sP].[LR](T)[sP].[dR](T)[sP].[dR](T)[sP].[LR](T)[sP].[LR](A) | | | |
| 1830 | 1830_3 | [LR](T)[sP].[LR](T)[sP].[LR]([5meC])[sP].[LR]([5meC])[sP].[dR](A)[sP].[LR](A)[sP]. | | 91.8 | 78.4 |
| | | [dR](A)[sP].[dR](A)[sP].[LR](T)[sP].[dR](T)[sP].[dR](A)[sP].[dR](C)[sP].[dR](T)[sP]. | | | |
| | | [dR](T)[sP].[dR](C)[sP].[dR](T)[sP].[dR](T)[sP].[dR](T)[sP].[LR](T)[sP].[LR](A) | | | |
| 1831 | 1831_2 | [LR](G)[sP].[LR](T)[sP].[LR](T)[sP].[LR]([5meC])[sP].[dR](C)[sP].[dR](A)[sP].[dR](A)[sP]. | | 93.6 | 84.9 |
| | | [dR](A)[sP].[dR](A)[sP].[dR](T)[sP].[dR](T)[sP].[LR](A)[sP].[LR]([5meC])[sP].[LR](T)[sP]. | | | |
| | | [dR](T)[sP].[dR](C)[sP].[dR](T)[sP].[LR](T)[sP].[LR](T) | | | |
| 1831 | 1831_3 | [LR](G)[sP].[LR](T)[sP].[LR](T)[sP].[dR](C)[sP].[LR]([5meC])[sP].[LR](A)[sP].[LR](A)[sP]. | | 69.1 | 70.3 |
| | | [dR](A)[sP].[dR](A)[sP].[dR](T)[sP].[dR](T)[sP].[dR](A)[sP].[dR](C)[sP].[dR](T)[sP]. | | | |
| | | [dR](T)[sP].[LR]([5meC])[sP].[dR](T)[sP].[LR](T)[sP].[LR](T) | | | |
| 1835 | 1835_2 | [LR]([5meC])[sP].[LR](A)[sP].[LR](T)[sP].[dR](A)[sP].[dR](T)[sP].[dR](T)[sP].[dR](T)[sP]. | | 41.1 | 46.6 |
| | | [dR](T)[sP].[dR](A)[sP].[dR](C)[sP].[LR](T)[sP].[dR](C)[sP].[dR](T)[sP].[LR](T)[sP]. | | | |
| | | [LR](T)[sP].[dR](T)[sP].[dR](T)[sP].[dR](A)[sP].[LR](T)[sP].[LR](T) | | | |
| 1835 | 1835_3 | [LR]([5meC])[sP].[LR](A)[sP].[dR](T)[sP].[dR](A)[sP].[dR](T)[sP].[dR](T)[sP].[dR](T)[sP]. | | 46.4 | 50.8 |
| | | [dR](T)[sP].[dR](A)[sP].[dR](C)[sP].[dR](T)[sP].[LR]([5meC])[sP].[dR](T)[sP].[LR](T)[sP]. | | | |
| | | [LR](T)[sP].[dR](T)[sP].[dR](T)[sP].[LR](A)[sP].[LR](T)[sP].[LR](T) | | | |
| 1835 | 1835_4 | [LR]([5meC])[sP].[LR](A)[sP].[dR](T)[sP].[LR](A)[sP].[dR](T)[sP].[dR](T)[sP].[dR](T)[sP]. | | 93.4 | 85 |
| | | [LR](T)[sP].[dR](A)[sP].[dR](C)[sP].[dR](T)[sP].[dR](C)[sP].[dR](T)[sP].[dR](T)[sP]. | | | |
| | | [LR](T)[sP].[dR](T)[sP].[LR](T)[sP].[LR](A)[sP].[LR](T)[sP].[LR](T) | | | |
| 1836 | 1836_3 | [LR]([5meC])[sP].[LR]([5meC])[sP].[dR](A)[sP].[dR](T)[sP].[dR](A)[sP].[dR](T)[sP]. | | 74.7 | 58.6 |
| | | [dR](T)[sP].[dR](T)[sP].[dR](T)[sP].[LR](A)[sP].[dR](C)[sP].[dR](T)[sP].[dR](C)[sP]. | | | |
| | | [dR](T)[sP].[dR](T)[sP].[dR](T)[sP].[LR](T)[sP].[LR](T)[sP].[LR](A)[sP].[LR](T) | | | |
| 1836 | 1836_4 | [LR]([5meC])[sP].[LR]([5meC])[sP].[LR](A)[sP].[dR](T)[sP].[LR](A)[sP].[dR](T)[sP]. | | 62.6 | 55.2 |
| | | [dR](T)[sP].[dR](T)[sP].[dR](T)[sP].[LR](A)[sP].[dR](C)[sP].[dR](T)[sP].[dR](C)[sP]. | | | |
| | | [dR](T)[sP].[dR](T)[sP].[dR](T)[sP].[LR](T)[sP].[dR](T)[sP].[LR](A)[sP].[LR](T) | | | |
| 1838 | 1838_2 | [LR]([5meC])[sP].[LR](A)[sP].[dR](T)[sP].[dR](A)[sP].[dR](T)[sP].[dR](T)[sP]. | | 64.7 | 66.5 |
| | | [dR](T)[sP].[dR](T)[sP].[LR](A)[sP].[LR]([5meC])[sP].[LR](T)[sP].[LR]([5meC])[sP]. | | | |
| | | [dR](T)[sP].[LR](T)[sP].[dR](T)[sP].[dR](T)[sP].[dR](T)[sP].[LR](A)[sP].[LR](T) | | | |
| 1838 | 1838_3 | [LR]([5meC])[sP].[LR](A)[sP].[dR](T)[sP].[LR](A)[sP].[dR](T)[sP].[dR](T)[sP]. | | 64.6 | 63 |
| | | [dR](T)[sP].[dR](T)[sP].[dR](A)[sP].[dR](C)[sP].[LR](T)[sP].[LR]([5meC])[sP]. | | | |
| | | [dR](T)[sP].[dR](T)[sP].[LR](T)[sP].[dR](T)[sP].[LR](T)[sP].[LR](A)[sP].[LR](T) | | | |
| 1840 | 1840_2 | [LR]([5meC])[sP].[LR]([5meC])[sP].[dR](A)[sP].[dR](T)[sP].[LR](A)[sP].[dR](T)[sP]. | | 66.7 | 52.6 |
| | | [LR](T)[sP].[dR](T)[sP].[dR](T)[sP].[dR](A)[sP].[dR](C)[sP].[dR](T)[sP].[dR](C)[sP]. | | | |
| | | [dR](T)[sP].[dR](T)[sP].[dR](T)[sP].[dR](T)[sP].[LR](T)[sP].[LR](A) | | | |
| 1842 | 1842_2 | [LR]([5meC])[sP].[LR]([5meC])[sP].[LR](A)[sP].[dR](T)[sP].[LR](A)[sP].[dR](T)[sP]. | | 57.2 | 51.9 |
| | | [LR](T)[sP].[dR](T)[sP].[dR](T)[sP].[dR](A)[sP].[dR](C)[sP].[dR](T)[sP].[dR](C)[sP]. | | | |
| | | [dR](T)[sP].[dR](T)[sP].[dR](T)[sP].[LR](T)[sP].[LR](T) | | | |
| 1844 | 1844_2 | [LR](A)[sP].[LR]([5meC])[sP].[dR](C)[sP].[LR]([5meC])[sP].[dR](A)[sP].[LR](T)[sP]. | | 50.4 | 56.6 |
| | | [dR](A)[sP].[dR](T)[sP].[dR](T)[sP].[dR](T)[sP].[dR](T)[sP].[dR](A)[sP].[dR](C)[sP]. | | | |
| | | [dR](T)[sP].[dR](C)[sP].[dR](T)[sP].[dR](T)[sP].[LR](T)[sP].[LR](T)[sP].[LR](T) | | | |
| 1845 | 1845_2 | [LR](T)[sP].[LR](A)[sP].[dR](C)[sP].[dR](C)[sP].[LR]([5meC])[sP].[dR](A)[sP]. | | 70.7 | 56.1 |
| | | [dR](T)[sP].[dR](A)[sP].[dR](T)[sP].[dR](T)[sP].[dR](T)[sP].[dR](T)[sP].[dR](A)[sP]. | | | |
| | | [dR](C)[sP].[dR](T)[sP].[dR](C)[sP].[dR](T)[sP].[dR](T)[sP].[dR](T)[sP].[LR](T)[sP].[LR](T) | | | |
| 1847 | 1847_2 | [LR]([5meC])[sP].[LR]([5meC])[sP].[dR](C)[sP].[dR](A)[sP].[dR](T)[sP].[dR](A)[sP]. | | 48.2 | 53.7 |
| | | [LR](T)[sP].[LR](T)[sP].[dR](T)[sP].[dR](T)[sP].[dR](A)[sP].[dR](C)[sP].[dR](T)[sP]. | | | |
| | | [dR](C)[sP].[LR](T)[sP].[LR](T)[sP].[LR](T)[sP].[LR](T) | | | |
| 1848 | 1848_2 | [LR](A)[sP].[LR]([5meC])[sP].[dR](C)[sP].[LR]([5meC])[sP].[dR](A)[sP].[dR](T)[sP]. | | 74.7 | 66.1 |
| | | [dR](A)[sP].[dR](T)[sP].[dR](T)[sP].[dR](T)[sP].[LR](T)[sP].[LR](A)[sP].[dR](C)[sP]. | | | |
| | | [dR](T)[sP].[dR](C)[sP].[dR](T)[sP].[dR](T)[sP].[LR](T)[sP].[LR](T) | | | |
| 1850 | 1850_2 | [LR](T)[sP].[LR](A)[sP].[dR](C)[sP].[dR](C)[sP].[dR](C)[sP].[dR](A)[sP].[dR](T)[sP]. | | 66.9 | 59.2 |
| | | [LR](A)[sP].[LR](T)[sP].[LR](T)[sP].[LR](T)[sP].[dR](T)[sP].[dR](A)[sP].[dR](C)[sP]. | | | |
| | | [dR](T)[sP].[dR](C)[sP].[dR](T)[sP].[LR](T)[sP].[LR](T) | | | |
| 1851 | 1851_2 | [LR](A)[sP].[LR]([5meC])[sP].[dR](C)[sP].[dR](C)[sP].[dR](A)[sP].[dR](T)[sP]. | | 53.6 | 49.8 |
| | | [LR](A)[sP].[dR](T)[sP].[dR](T)[sP].[dR](T)[sP].[dR](T)[sP].[dR](A)[sP].[dR](C)[sP]. | | | |
| | | [dR](T)[sP].[LR]([5meC])[sP].[dR](T)[sP].[LR](T)[sP].[LR](T) | | | |
| 1852 | 1852_3 | [LR](T)[sP].[LR](T)[sP].[dR](A)[sP].[LR]([5meC])[sP].[dR](C)[sP].[LR]([5meC])[sP]. | | 46.7 | 56.4 |
| | | [dR](A)[sP].[dR](T)[sP].[dR](A)[sP].[dR](T)[sP].[dR](T)[sP].[dR](T)[sP].[dR](T)[sP]. | | | |
| | | [dR](A)[sP].[dR](C)[sP].[dR](T)[sP].[dR](C)[sP].[LR](T)[sP].[LR](T)[sP].[LR](T) | | | |
| 1853 | 1853_3 | [LR](T)[sP].[LR](T)[sP].[dR](T)[sP].[LR](A)[sP].[dR](C)[sP].[LR]([5meC])[sP]. | | 71.2 | 56.9 |
| | | [dR](C)[sP].[dR](A)[sP].[dR](T)[sP].[dR](A)[sP].[dR](T)[sP].[LR](T)[sP].[LR](T)[sP]. | | | |
| | | [dR](T)[sP].[dR](A)[sP].[dR](C)[sP].[dR](T)[sP].[dR](C)[sP].[dR](T)[sP].[LR](T)[sP].[LR](T) | | | |
| 1853 | 1853_4 | [LR](T)[sP].[LR](T)[sP].[dR](T)[sP].[LR](A)[sP].[dR](C)[sP].[dR](C)[sP].[dR](C)[sP]. | | 83.8 | 59.1 |
| | | [dR](A)[sP].[dR](T)[sP].[dR](A)[sP].[LR](T)[sP].[dR](T)[sP].[LR](T)[sP].[dR](T)[sP]. | | | |
| | | [dR](A)[sP].[dR](C)[sP].[dR](T)[sP].[dR](C)[sP].[dR](T)[sP].[LR](T)[sP].[LR](T) | | | |
| 1853 | 1853_5 | [LR](T)[sP].[LR](T)[sP].[LR](T)[sP].[dR](A)[sP].[dR](C)[sP].[dR](C)[sP].[dR](C)[sP]. | | 72.8 | 54.7 |
| | | [dR](A)[sP].[dR](T)[sP].[LR](A)[sP].[dR](T)[sP].[dR](T)[sP].[LR](T)[sP].[dR](T)[sP]. | | | |
| | | [dR](A)[sP].[dR](C)[sP].[dR](T)[sP].[dR](C)[sP].[dR](T)[sP].[LR](T)[sP].[LR](T) | | | |
| 1853 | 1853_6 | [LR](T)[sP].[LR](T)[sP].[dR](T)[sP].[dR](A)[sP].[dR](C)[sP].[dR](C)[sP].[dR](C)[sP]. | | 94.7 | 80.6 |
| | | [LR](A)[sP].[dR](T)[sP].[dR](A)[sP].[dR](T)[sP].[dR](T)[sP].[LR](T)[sP].[dR](T)[sP]. | | | |
| | | [dR](A)[sP].[dR](C)[sP].[dR](T)[sP].[dR](C)[sP].[dR](T)[sP].[LR](T)[sP].[LR](T) | | | |
| 1854 | 1854_2 | [LR](T)[sP].[LR](T)[sP].[LR](A)[sP].[dR](C)[sP].[dR](C)[sP].[dR](C)[sP].[LR](A)[sP]. | | 52.3 | 53.3 |
| | | [dR](T)[sP].[dR](A)[sP].[LR](T)[sP].[dR](T)[sP].[dR](T)[sP].[dR](T)[sP].[dR](A)[sP]. | | | |
| | | [dR](C)[sP].[dR](T)[sP].[LR]([5meC])[sP].[LR](T)[sP].[LR](T) | | | |
| 1854 | 1854_3 | [LR](T)[sP].[LR](T)[sP].[dR](A)[sP].[LR]([5meC])[sP].[dR](C)[sP].[dR](C)[sP].[dR](A)[sP]. | | 49.4 | 53.9 |
| | | [LR](T)[sP].[dR](A)[sP].[LR](T)[sP].[dR](T)[sP].[dR](T)[sP].[dR](T)[sP].[dR](A)[sP]. | | | |
| | | [dR](C)[sP].[dR](T)[sP].[dR](C)[sP].[LR](T)[sP].[LR](T) | | | |
| 1855 | 1855_2 | [LR](T)[sP].[LR](T)[sP].[dR](T)[sP].[LR](A)[sP].[dR](C)[sP].[dR](C)[sP].[LR]([5meC])[sP]. | | 53.7 | 53.4 |
| | | [LR](A)[sP].[dR](T)[sP].[dR](A)[sP].[dR](T)[sP].[LR](T)[sP].[dR](T)[sP].[dR](T)[sP]. | | | |
| | | [dR](A)[sP].[dR](C)[sP].[dR](T)[sP].[dR](C)[sP].[LR](T)[sP].[LR](T) | | | |
| 1855 | 1855_3 | [LR](T)[sP].[LR](T)[sP].[LR](T)[sP].[dR](A)[sP].[LR]([5meC])[sP].[dR](C)[sP].[dR](C)[sP]. | | 63.5 | 56.6 |
| | | [dR](A)[sP].[dR](T)[sP].[dR](A)[sP].[dR](T)[sP].[dR](T)[sP].[dR](T)[sP].[LR](T)[sP]. | | | |
| | | [dR](A)[sP].[dR](C)[sP].[dR](T)[sP].[dR](C)[sP].[LR](T)[sP].[LR](T) | | | |
| 1855 | 1855_4 | [LR](T)[sP].[LR](T)[sP].[dR](T)[sP].[dR](A)[sP].[dR](C)[sP].[dR](C)[sP].[dR](C)[sP]. | | 42.7 | 45.3 |
| | | [dR](A)[sP].[dR](T)[sP].[LR](A)[sP].[dR](T)[sP].[dR](T)[sP].[dR](T)[sP].[dR](T)[sP]. | | | |
| | | [LR](A)[sP].[dR](C)[sP].[LR](T)[sP].[LR]([5meC])[sP].[LR](T)[sP].[LR](T) | | | |
| 1857 | 1857_2 | [LR](T)[sP].[LR](A)[sP].[dR](C)[sP].[LR]([5meC])[sP].[dR](C)[sP].[LR](A)[sP].[dR](T)[sP]. | | 73.2 | 73.2 |
| | | [dR](A)[sP].[dR](T)[sP].[dR](T)[sP].[dR](T)[sP].[dR](T)[sP].[dR](A)[sP].[LR]([5meC])[sP]. | | | |
| | | [dR](T)[sP].[dR](C)[sP].[LR](T)[sP].[LR](T) | | | |
| 1857 | 1857_3 | [LR](T)[sP].[LR](A)[sP].[dR](C)[sP].[dR](C)[sP].[dR](C)[sP].[dR](A)[sP].[dR](T)[sP]. | | 81.1 | 75.9 |
| | | [dR](A)[sP].[dR](T)[sP].[dR](T)[sP].[LR](T)[sP].[dR](T)[sP].[dR](A)[sP]. | | | |
| | | [LR]([5meC])[sP].[dR](T)[sP].[dR](C)[sP].[LR](T)[sP].[LR](T) | | | |
| 1858 | 1858_2 | [LR](T)[sP].[LR](A)[sP].[dR](C)[sP].[dR](C)[sP].[LR]([5meC])[sP].[dR](A)[sP].[dR](T)[sP]. | | 66.2 | 66.9 |
| | | [dR](A)[sP].[dR](T)[sP].[dR](T)[sP].[dR](T)[sP].[dR](T)[sP].[dR](A)[sP].[LR]([5meC])[sP]. | | | |
| | | [dR](T)[sP].[LR]([5meC])[sP].[LR](T) | | | |
| 1859 | 1859_2 | [LR](T)[sP].[LR](T)[sP].[LR](A)[sP].[dR](C)[sP].[dR](C)[sP].[dR](C)[sP].[dR](A)[sP]. | | 68.2 | 66.1 |
| | | [dR](T)[sP].[dR](A)[sP].[dR](T)[sP].[LR](T)[sP].[LR](T)[sP].[dR](T)[sP].[dR](A)[sP]. | | | |
| | | [dR](C)[sP].[LR](T)[sP].[LR]([5meC])[sP].[LR](T) | | | |
| 1859 | 1859_3 | [LR](T)[sP].[LR](T)[sP].[LR](A)[sP].[dR](C)[sP].[dR](C)[sP].[dR](C)[sP].[dR](A)[sP]. | | 67.5 | 64.4 |
| | | [dR](T)[sP].[dR](A)[sP].[dR](T)[sP].[dR](T)[sP].[LR](T)[sP].[dR](T)[sP].[LR](A)[sP]. | | | |
| | | [dR](C)[sP].[dR](T)[sP].[LR]([5meC])[sP].[LR](T) | | | |
| 1862 | 1862_2 | [LR](T)[sP].[LR](T)[sP].[LR](T)[sP].[dR](A)[sP].[LR]([5meC])[sP].[dR](C)[sP].[dR](C)[sP]. | | 76.4 | 70 |
| | | [dR](A)[sP].[dR](T)[sP].[dR](A)[sP].[dR](T)[sP].[dR](T)[sP].[LR](T)[sP].[dR](T)[sP]. | | | |
| | | [LR](A)[sP].[dR](C)[sP].[LR](T)[sP].[LR]([5meC]) | | | |
| 1864 | 1864_2 | [LR](G)[sP].[LR](T)[sP].[LR](T)[sP].[dR](T)[sP].[dR](A)[sP].[dR](C)[sP].[dR](C)[sP]. | | 72.9 | 58.2 |
| | | [dR](C)[sP].[dR](A)[sP].[LR](T)[sP].[dR](A)[sP].[dR](T)[sP].[dR](T)[sP].[dR](T)[sP]. | | | |
| | | [LR](T)[sP].[dR](A)[sP].[LR]([5meC])[sP].[LR](T) | | | |
| 1864 | 1864_3 | [LR](G)[sP].[LR](T)[sP].[dR](T)[sP].[LR](T)[sP].[dR](A)[sP].[dR](C)[sP].[dR](C)[sP]. | | 35.3 | 45.4 |
| | | [LR]([5meC])[sP].[dR](A)[sP].[dR](T)[sP].[dR](A)[sP].[dR](T)[sP].[dR](T)[sP]. | | | |
| | | [dR](T)[sP].[dR](T)[sP].[dR](A)[sP].[LR]([5meC])[sP].[LR](T) | | | |
| 1864 | 1864_4 | [LR](G)[sP].[LR](T)[sP].[dR](T)[sP].[dR](T)[sP].[LR](A)[sP].[dR](C)[sP].[dR](C)[sP]. | | 81.1 | 69.4 |
| | | [dR](C)[sP].[dR](A)[sP].[dR](T)[sP].[dR](A)[sP].[LR](T)[sP].[LR](T)[sP].[dR](T)[sP]. | | | |
| | | [dR](T)[sP].[LR](A)[sP].[LR]([5meC])[sP].[LR](T) | | | |
| 1865 | 1865_2 | [LR](T)[sP].[LR](G)[sP].[dR](T)[sP].[dR](T)[sP].[dR](T)[sP].[LR](A)[sP].[dR](C)[sP]. | | 70.2 | 66.3 |
| | | [dR](C)[sP].[LR]([5meC])[sP].[dR](A)[sP].[dR](T)[sP].[dR](A)[sP].[dR](T)[sP]. | | | |
| | | [dR](T)[sP].[dR](T)[sP].[LR](T)[sP].[LR](A)[sP].[LR]([5meC]) | | | |
| 1889 | 1889_2 | [LR](G)[sP].[LR](A)[sP].[LR](A)[sP].[dR](C)[sP].[dR](C)[sP].[dR](A)[sP].[LR](T)[sP]. | | 74.4 | 73 |
| | | [dR](T)[sP].[dR](A)[sP].[dR](C)[sP].[dR](T)[sP].[dR](A)[sP].[dR](T)[sP].[LR](T)[sP]. | | | |
| | | [dR](A)[sP].[LR](T)[sP].[LR]([5meC])[sP].[LR](A)[sP].[LR](A) | | | |
| 1889 | 1889_3 | [LR](G)[sP].[LR](A)[sP].[dR](A)[sP].[LR]([5meC])[sP].[LR]([5meC])[sP].[dR](A)[sP]. | | 82.1 | 80.5 |
| | | [dR](T)[sP].[dR](T)[sP].[dR](A)[sP].[dR](C)[sP].[dR](T)[sP].[LR](A)[sP].[LR](T)[sP]. | | | |
| | | [LR](T)[sP].[dR](A)[sP].[LR](T)[sP].[dR](C)[sP].[LR](A)[sP].[LR](A) | | | |
| 1889 | 1889_4 | [LR](G)[sP].[LR](A)[sP].[dR](A)[sP].[LR]([5meC])[sP].[dR](C)[sP].[LR](A)[sP]. | | 35 | 51.1 |
| | | [dR](T)[sP].[dR](T)[sP].[dR](A)[sP].[dR](C)[sP].[dR](T)[sP].[dR](A)[sP].[dR](T)[sP]. | | | |
| | | [dR](T)[sP].[dR](A)[sP].[LR](T)[sP].[LR]([5meC])[sP].[LR](A)[sP].[LR](A) | | | |
| 1889 | 1889_5 | [LR](G)[sP].[LR](A)[sP].[LR](A)[sP].[dR](C)[sP].[dR](C)[sP].[dR](A)[sP].[LR](T)[sP]. | | 59.5 | 68.1 |
| | | [dR](T)[sP].[dR](A)[sP].[LR]([5meC])[sP].[dR](T)[sP].[dR](A)[sP].[dR](T)[sP]. | | | |
| | | [dR](T)[sP].[dR](A)[sP].[dR](T)[sP].[LR]([5meC])[sP].[LR](A)[sP].[LR](A) | | | |
| 1889 | 1889_6 | [LR](G)[sP].[LR](A)[sP].[dR](A)[sP].[LR]([5meC])[sP].[LR]([5meC])[sP].[dR](A)[sP]. | | 27.1 | 50 |
| | | [dR](T)[sP].[dR](T)[sP].[dR](A)[sP].[dR](C)[sP].[dR](T)[sP].[dR](A)[sP].[dR](T)[sP]. | | | |
| | | [dR](T)[sP].[dR](A)[sP].[dR](T)[sP].[LR]([5meC])[sP].[LR](A)[sP].[LR](A) | | | |
| 1889 | 1889_7 | [LR](G)[sP].[LR](A)[sP].[dR](A)[sP].[LR]([5meC])[sP].[dR](C)[sP].[dR](A)[sP].[dR](T)[sP]. | | 82.3 | 77.9 |
| | | [dR](T)[sP].[dR](A)[sP].[dR](C)[sP].[LR](T)[sP].[dR](A)[sP].[LR](T)[sP].[LR](T)[sP]. | | | |
| | | [LR](A)[sP].[dR](T)[sP].[dR](C)[sP].[LR](A)[sP].[LR](A) | | | |
| 1889 | 1889_8 | [LR](G)[sP].[LR](A)[sP].[dR](A)[sP].[LR]([5meC])[sP].[dR](C)[sP].[LR](A)[sP].[dR](T)[sP]. | | 58 | 63.4 |
| | | [dR](T)[sP].[dR](A)[sP].[LR]([5meC])[sP].[dR](T)[sP].[dR](A)[sP].[dR](T)[sP].[dR](T)[sP]. | | | |
| | | [dR](A)[sP].[dR](T)[sP].[LR]([5meC])[sP].[LR](A)[sP].[LR](A) | | | |
| 1889 | 1889_9 | [LR](G)[sP].[LR](A)[sP].[dR](A)[sP].[dR](C)[sP].[LR]([5meC])[sP].[dR](A)[sP].[dR](T)[sP]. | | 31.7 | 50 |
| | | [LR](T)[sP].[dR](A)[sP].[dR](C)[sP].[dR](T)[sP].[dR](A)[sP].[dR](T)[sP].[dR](T)[sP]. | | | |
| | | [dR](A)[sP].[dR](T)[sP].[LR]([5meC])[sP].[LR](A)[sP].[LR](A) | | | |
| 1889 | 1889_10 | [LR](G)[sP].[LR](A)[sP].[dR](A)[sP].[dR](C)[sP].[dR](C)[sP].[dR](A)[sP].[LR](T)[sP]. | | 61.3 | 65.6 |
| | | [dR](T)[sP].[dR](A)[sP].[LR]([5meC])[sP].[dR](T)[sP].[dR](A)[sP].[dR](T)[sP].[dR](T)[sP]. | | | |
| | | [dR](A)[sP].[dR](T)[sP].[LR]([5meC])[sP].[LR](A)[sP].[LR](A) | | | |
| 1890 | 1890_2 | [LR](A)[sP].[LR](G)[sP].[dR](A)[sP].[LR](A)[sP].[dR](C)[sP].[dR](C)[sP].[dR](A)[sP]. | | 45.7 | 55.7 |
| | | [dR](T)[sP].[dR](T)[sP].[dR](A)[sP].[dR](C)[sP].[dR](T)[sP].[LR](A)[sP].[LR](T)[sP]. | | | |
| | | [dR](T)[sP].[LR](A)[sP].[dR](T)[sP].[LR]([5meC])[sP].[LR](A) | | | |
| 1890 | 1890_3 | [LR](A)[sP].[LR](G)[sP].[dR](A)[sP].[dR](A)[sP].[dR](C)[sP].[dR](C)[sP].[dR](A)[sP]. | | 38.6 | 46.2 |
| | | [dR](T)[sP].[LR](T)[sP].[dR](A)[sP].[dR](C)[sP].[dR](T)[sP].[dR](A)[sP].[dR](T)[sP]. | | | |
| | | [dR](T)[sP].[LR](A)[sP].[LR](T)[sP].[LR]([5meC])[sP].[LR](A) | | | |
| 1890 | 1890_4 | [LR](A)[sP].[LR](G)[sP].[dR](A)[sP].[dR](A)[sP].[dR](C)[sP].[LR]([5meC])[sP]. | | 34.6 | 47.5 |
| | | [LR](A)[sP].[dR](T)[sP].[dR](T)[sP].[dR](A)[sP].[dR](C)[sP].[dR](T)[sP].[dR](A)[sP]. | | | |
| | | [LR](T)[sP].[dR](T)[sP].[dR](A)[sP].[dR](T)[sP].[LR]([5meC])[sP].[LR](A) | | | |
| 1891 | 1891_2 | [LR](A)[sP].[LR](G)[sP].[LR](A)[sP].[dR](A)[sP].[dR](C)[sP].[dR](C)[sP].[dR](A)[sP]. | | 25.2 | 39.3 |
| | | [dR](T)[sP].[dR](T)[sP].[dR](A)[sP].[dR](C)[sP].[LR](T)[sP].[dR](A)[sP].[LR](T)[sP]. | | | |
| | | [LR](T)[sP].[dR](A)[sP].[LR](T)[sP].[LR]([5meC]) | | | |
| 1892 | 1892_2 | [LR]([5meC])[sP].[LR](T)[sP].[dR](A)[sP].[LR](G)[sP].[LR](A)[sP].[LR](A)[sP]. | | 83.7 | 76.7 |
| | | [dR](C)[sP].[LR]([5meC])[sP].[dR](A)[sP].[dR](T)[sP].[dR](T)[sP].[dR](A)[sP]. | | | |
| | | [dR](C)[sP].[dR](T)[sP].[dR](A)[sP].[LR](T)[sP].[LR](T)[sP].[LR](A) | | | |
| 1892 | 1892_3 | [LR]([5meC])[sP].[LR](T)[sP].[dR](A)[sP].[dR](G)[sP].[LR](A)[sP].[LR](A)[sP]. | | 75.5 | 80.1 |
| | | [LR]([5meC])[sP].[dR](C)[sP].[dR](A)[sP].[LR](T)[sP].[dR](T)[sP].[dR](A)[sP]. | | | |
| | | [dR](C)[sP].[dR](T)[sP].[dR](A)[sP].[dR](T)[sP].[LR](T)[sP].[LR](A) | | | |
| 1893 | 1893_2 | [LR](T)[sP].[LR](A)[sP].[dR](G)[sP].[dR](A)[sP].[dR](A)[sP].[dR](C)[sP].[dR](C)[sP]. | | 86.6 | 83.4 |
| | | [dR](A)[sP].[dR](T)[sP].[LR](T)[sP].[dR](A)[sP].[LR]([5meC])[sP].[LR](T)[sP]. | | | |
| | | [LR](A)[sP].[dR](T)[sP].[LR](T)[sP].[LR](A) | | | |
| 1894 | 1894_2 | [LR]([5meC])[sP].[LR](T)[sP].[LR](A)[sP].[dR](G)[sP].[dR](A)[sP].[dR](A)[sP].[dR](C)[sP]. | | 91 | 85.5 |
| | | [dR](C)[sP].[dR](A)[sP].[dR](T)[sP].[dR](T)[sP].[dR](A)[sP].[LR]([5meC])[sP].[dR](T)[sP]. | | | |
| | | [LR](A)[sP].[LR](T)[sP].[LR](T) | | | |
| 1902 | 1902_2 | [LR](G)[sP].[LR](A)[sP].[dR](T)[sP].[LR]([5meC])[sP].[dR](A)[sP].[LR](A)[sP].[LR](A)[sP]. | | 89.5 | 80.6 |
| | | [LR](A)[sP].[dR](A)[sP].[dR](A)[sP].[dR](C)[sP].[dR](T)[sP].[dR](T)[sP].[dR](T)[sP]. | | | |
| | | [LR]([5meC])[sP].[dR](C)[sP].[LR]([5meC])[sP].[LR](T) | | | |
| 1902 | 1902_3 | [LR](G)[sP].[LR](A)[sP].[dR](T)[sP].[LR]([5meC])[sP].[LR](A)[sP].[dR](A)[sP].[LR](A)[sP]. | | 104 | 85.5 |
| | | [LR](A)[sP].[dR](A)[sP].[dR](A)[sP].[dR](C)[sP].[dR](T)[sP].[dR](T)[sP].[dR](T)[sP]. | | | |
| | | [LR]([5meC])[sP].[dR](C)[sP].[LR]([5meC])[sP].[LR](T) | | | |
| 1902 | 1902_4 | [LR](G)[sP].[LR](A)[sP].[dR](T)[sP].[LR]([5meC])[sP].[LR](A)[sP].[dR](A)[sP].[dR](A)[sP]. | | 97.6 | 84 |
| | | [dR](A)[sP].[LR](A)[sP].[dR](A)[sP].[dR](C)[sP].[dR](T)[sP].[dR](T)[sP].[dR](T)[sP]. | | | |
| | | [dR](C)[sP].[LR]([5meC])[sP].[LR]([5meC])[sP].[LR](T) | | | |
| 1902 | 1902_5 | [LR](G)[sP].[LR](A)[sP].[dR](T)[sP].[LR]([5meC])[sP].[dR](A)[sP].[dR](A)[sP].[dR](A)[sP]. | | 88.5 | 79.3 |
| | | [dR](A)[sP].[dR](A)[sP].[dR](A)[sP].[dR](C)[sP].[dR](T)[sP].[dR](T)[sP].[dR](T)[sP]. | | | |
| | | [dR](C)[sP].[LR]([5meC])[sP].[LR]([5meC])[sP].[LR](T) | | | |
| 1902 | 1902_6 | [LR](G)[sP].[LR](A)[sP].[dR](T)[sP].[LR]([5meC])[sP].[LR](A)[sP].[dR](A)[sP].[dR](A)[sP]. | | 96 | 75.3 |
| | | [dR](A)[sP].[LR](A)[sP].[LR](A)[sP].[dR](C)[sP].[dR](T)[sP].[dR](T)[sP].[dR](T)[sP]. | | | |
| | | [dR](C)[sP].[dR](C)[sP].[LR]([5meC])[sP].[LR](T) | | | |
| 1903 | 1903_2 | [LR](A)[sP].[LR](G)[sP].[dR](A)[sP].[dR](T)[sP].[dR](C)[sP].[dR](A)[sP].[dR](A)[sP]. | | 84.2 | 88.6 |
| | | [dR](A)[sP].[LR](A)[sP].[dR](A)[sP].[dR](A)[sP].[dR](C)[sP].[LR](T)[sP].[dR](T)[sP]. | | | |
| | | [dR](T)[sP].[LR]([5meC])[sP].[dR](C)[sP].[LR]([5meC])[sP].[LR](T) | | | |
| 1903 | 1903_3 | [LR](A)[sP].[LR](G)[sP].[dR](A)[sP].[dR](T)[sP].[LR]([5meC])[sP].[LR](A)[sP].[dR](A)[sP]. | | 61.5 | 42.3 |
| | | [LR](A)[sP].[LR](A)[sP].[dR](A)[sP].[dR](A)[sP].[dR](C)[sP].[dR](T)[sP].[dR](T)[sP]. | | | |
| | | [dR](T)[sP].[dR](C)[sP].[dR](C)[sP].[LR]([5meC])[sP].[LR](T) | | | |
| 1903 | 1903_4 | [LR](A)[sP].[LR](G)[sP].[dR](A)[sP].[dR](T)[sP].[dR](C)[sP].[dR](A)[sP].[dR](A)[sP]. | | 84.7 | 85.1 |
| | | [dR](A)[sP].[dR](A)[sP].[LR](A)[sP].[dR](A)[sP].[LR]([5meC])[sP].[dR](T)[sP]. | | | |
| | | [dR](T)[sP].[dR](T)[sP].[LR]([5meC])[sP].[dR](C)[sP].[LR]([5meC])[sP].[LR](T) | | | |
| 1903 | 1903_5 | [LR](A)[sP].[LR](G)[sP].[LR](A)[sP].[dR](T)[sP].[dR](C)[sP].[dR](A)[sP].[dR](A)[sP]. | | 72.5 | 77.7 |
| | | [dR](A)[sP].[LR](A)[sP].[dR](A)[sP].[dR](A)[sP].[dR](C)[sP].[dR](T)[sP].[dR](T)[sP]. | | | |
| | | [dR](T)[sP].[LR]([5meC])[sP].[dR](C)[sP].[LR]([5meC])[sP].[LR](T) | | | |
| 1903 | 1903_6 | [LR](A)[sP].[LR](G)[sP].[dR](A)[sP].[dR](T)[sP].[LR]([5meC])[sP].[dR](A)[sP].[dR](A)[sP]. | | 69.8 | 62.9 |
| | | [dR](A)[sP].[LR](A)[sP].[LR](A)[sP].[dR](A)[sP].[dR](C)[sP].[dR](T)[sP].[dR](T)[sP]. | | | |
| | | [dR](T)[sP].[dR](C)[sP].[LR]([5meC])[sP].[LR]([5meC])[sP].[LR](T) | | | |
| 1903 | 1903_7 | [LR](A)[sP].[LR](G)[sP].[LR](A)[sP].[dR](T)[sP].[LR]([5meC])[sP].[dR](A)[sP].[dR](A)[sP]. | | 92.2 | 76.1 |
| | | [LR](A)[sP].[dR](A)[sP].[dR](A)[sP].[dR](A)[sP].[dR](C)[sP].[dR](T)[sP].[dR](T)[sP]. | | | |
| | | [dR](T)[sP].[LR]([5meC])[sP].[dR](C)[sP].[LR]([5meC])[sP].[LR](T) | | | |
| 1903 | 1903_8 | [LR](A)[sP].[LR](G)[sP].[dR](A)[sP].[dR](T)[sP].[dR](C)[sP].[dR](A)[sP].[LR](A)[sP]. | | 78.9 | 73.5 |
| | | [LR](A)[sP].[dR](A)[sP].[LR](A)[sP].[dR](A)[sP].[dR](C)[sP].[dR](T)[sP].[dR](T)[sP]. | | | |
| | | [dR](T)[sP].[dR](C)[sP].[LR]([5meC])[sP].[LR]([5meC])[sP].[LR](T) | | | |
| 1903 | 1903_9 | [LR](A)[sP].[LR](G)[sP].[dR](A)[sP].[dR](T)[sP].[dR](C)[sP].[LR](A)[sP].[LR](A)[sP]. | | 62.3 | 60.6 |
| | | [LR](A)[sP].[LR](A)[sP].[dR](A)[sP].[dR](A)[sP].[dR](C)[sP].[dR](T)[sP].[dR](T)[sP]. | | | |
| | | [dR](T)[sP].[LR]([5meC])[sP].[dR](C)[sP].[LR]([5meC])[sP].[LR](T) | | | |
| 1903 | 1903_10 | [LR](A)[sP].[LR](G)[sP].[dR](A)[sP].[dR](T)[sP].[dR](C)[sP].[LR](A)[sP].[dR](A)[sP]. | | 90.2 | 88.5 |
| | | [dR](A)[sP].[dR](A)[sP].[dR](A)[sP].[dR](A)[sP].[dR](C)[sP].[LR](T)[sP].[dR](T)[sP]. | | | |
| | | [dR](T)[sP].[dR](C)[sP].[LR]([5meC])[sP].[LR]([5meC])[sP].[LR](T) | | | |
| 1904 | 1904_2 | [LR](A)[sP].[LR](G)[sP].[LR](A)[sP].[dR](T)[sP].[dR](C)[sP].[dR](A)[sP].[dR](A)[sP]. | | 80.4 | 77.3 |
| | | [LR](A)[sP].[dR](A)[sP].[LR](A)[sP].[dR](A)[sP].[dR](C)[sP].[dR](T)[sP].[dR](T)[sP]. | | | |
| | | [dR](T)[sP].[dR](C)[sP].[LR]([5meC])[sP].[LR]([5meC]) | | | |
| 1904 | 1904_3 | [LR](A)[sP].[LR](G)[sP].[dR](A)[sP].[LR](T)[sP].[LR]([5meC])[sP].[dR](A)[sP].[dR](A)[sP]. | | 93.5 | 86.5 |
| | | [dR](A)[sP].[dR](A)[sP].[dR](A)[sP].[dR](A)[sP].[LR]([5meC])[sP].[LR](T)[sP].[dR](T)[sP]. | | | |
| | | [dR](T)[sP].[dR](C)[sP].[LR]([5meC])[sP].[LR]([5meC]) | | | |
| 1904 | 1904_4 | [LR](A)[sP].[LR](G)[sP].[dR](A)[sP].[LR](T)[sP].[dR](C)[sP].[LR](A)[sP].[dR](A)[sP]. | | 85 | 80.3 |
| | | [dR](A)[sP].[dR](A)[sP].[dR](A)[sP].[dR](A)[sP].[dR](C)[sP].[LR](T)[sP].[dR](T)[sP]. | | | |
| | | [dR](T)[sP].[LR]([5meC])[sP].[LR]([5meC])[sP].[LR]([5meC]) | | | |
| 1904 | 1904_5 | [LR](A)[sP].[LR](G)[sP].[dR](A)[sP].[dR](T)[sP].[dR](C)[sP].[dR](A)[sP].[dR](A)[sP]. | | 93 | 89.7 |
| | | [dR](A)[sP].[dR](A)[sP].[LR](A)[sP].[dR](A)[sP].[dR](C)[sP].[LR](T)[sP].[LR](T)[sP]. | | | |
| | | [LR](T)[sP].[dR](C)[sP].[LR]([5meC])[sP].[LR]([5meC]) | | | |
| 1904 | 1904_6 | [LR](A)[sP].[LR](G)[sP].[LR](A)[sP].[dR](T)[sP].[dR](C)[sP].[LR](A)[sP].[dR](A)[sP]. | | 79.7 | 77.5 |
| | | [LR](A)[sP].[dR](A)[sP].[dR](A)[sP].[dR](A)[sP].[dR](C)[sP].[dR](T)[sP].[dR](T)[sP]. | | | |
| | | [LR](T)[sP].[dR](C)[sP].[LR]([5meC])[sP].[LR]([5meC]) | | | |
| 1904 | 1904_7 | [LR](A)[sP].[LR](G)[sP].[dR](A)[sP].[dR](T)[sP].[dR](C)[sP].[dR](A)[sP].[dR](A)[sP]. | | 86.3 | 89.6 |
| | | [dR](A)[sP].[dR](A)[sP].[dR](A)[sP].[LR](A)[sP].[LR]([5meC])[sP].[LR](T)[sP]. | | | |
| | | [dR](T)[sP].[dR](T)[sP].[dR](C)[sP].[LR]([5meC])[sP].[LR]([5meC]) | | | |
| 1904 | 1904_8 | [LR](A)[sP].[LR](G)[sP].[dR](A)[sP].[LR](T)[sP].[LR]([5meC])[sP].[dR](A)[sP].[LR](A)[sP]. | | 97.2 | 90.7 |
| | | [dR](A)[sP].[dR](A)[sP].[LR](A)[sP].[dR](A)[sP].[dR](C)[sP].[dR](T)[sP].[dR](T)[sP]. | | | |
| | | [dR](T)[sP].[dR](C)[sP].[LR]([5meC])[sP].[LR]([5meC]) | | | |
| 1904 | 1904_9 | [LR](A)[sP].[LR](G)[sP].[dR](A)[sP].[dR](T)[sP].[dR](C)[sP].[dR](A)[sP].[dR](A)[sP]. | | 91.6 | 93.7 |
| | | [dR](A)[sP].[LR](A)[sP].[LR](A)[sP].[dR](A)[sP].[LR]([5meC])[sP].[dR](T)[sP].[LR](T)[sP]. | | | |
| | | [dR](T)[sP].[LR]([5meC])[sP].[LR]([5meC])[sP].[LR]([5meC]) | | | |
| 1904 | 1904_10 | [LR](A)[sP].[LR](G)[sP].[dR](A)[sP].[dR](T)[sP].[LR]([5meC])[sP].[dR](A)[sP].[dR](A)[sP]. | | 94.7 | 95.3 |
| | | [dR](A)[sP].[dR](A)[sP].[dR](A)[sP].[dR](A)[sP].[LR]([5meC])[sP].[LR](T)[sP].[LR](T)[sP]. | | | |
| | | [dR](T)[sP].[dR](C)[sP].[LR]([5meC])[sP].[LR]([5meC]) | | | |
| 1904 | 1904_11 | [LR](A)[sP].[LR](G)[sP].[dR](A)[sP].[dR](T)[sP].[LR]([5meC])[sP].[LR](A)[sP].[LR](A)[sP]. | | 71.8 | 65.7 |
| | | [LR](A)[sP].[dR](A)[sP].[dR](A)[sP].[dR](A)[sP].[dR](C)[sP].[dR](T)[sP].[dR](T)[sP]. | | | |
| | | [LR](T)[sP].[dR](C)[sP].[LR]([5meC])[sP].[LR]([5meC]) | | | |
| 1904 | 1904_12 | [LR](A)[sP].[LR](G)[sP].[LR](A)[sP].[dR](T)[sP].[LR]([5meC])[sP].[LR](A)[sP].[dR](A)[sP]. | | 99.4 | 86.7 |
| | | [LR](A)[sP].[LR](A)[sP].[dR](A)[sP].[dR](A)[sP].[dR](C)[sP].[dR](T)[sP].[dR](T)[sP]. | | | |
| | | [dR](T)[sP].[dR](C)[sP].[LR]([5meC])[sP].[LR]([5meC]) | | | |
| 1905 | 1905_2 | [LR](T)[sP].[LR]([5meC])[sP].[LR]([5meC])[sP].[dR](T)[sP].[dR](A)[sP].[LR](G)[sP]. | | 98.5 | 91 |
| | | [LR](A)[sP].[dR](T)[sP].[LR]([5meC])[sP].[dR](A)[sP].[dR](A)[sP].[dR](A)[sP].[dR](A)[sP]. | | | |
| | | [dR](A)[sP].[dR](A)[sP].[LR]([5meC])[sP].[LR](T) | | | |
| 1905 | 1905_3 | [LR](T)[sP].[LR]([5meC])[sP].[LR]([5meC])[sP].[LR](T)[sP].[dR](A)[sP].[LR](G)[sP]. | | 105 | 92.5 |
| | | [dR](A)[sP].[LR](T)[sP].[LR]([5meC])[sP].[dR](A)[sP].[dR](A)[sP].[dR](A)[sP].[dR](A)[sP]. | | | |
| | | [dR](A)[sP].[dR](A)[sP].[LR]([5meC])[sP].[LR](T) | | | |
| 1908 | 1908_2 | [LR](A)[sP].[LR](T)[sP].[dR](A)[sP].[dR](T)[sP].[dR](T)[sP].[dR](T)[sP].[dR](T)[sP]. | | 85.4 | 65.7 |
| | | [LR](T)[sP].[dR](T)[sP].[dR](C)[sP].[dR](T)[sP].[dR](T)[sP].[dR](C)[sP].[dR](T)[sP]. | | | |
| | | [dR](C)[sP].[LR](T)[sP].[dR](T)[sP].[dR](T)[sP].[LR](T)[sP].[LR]([5meC]) | | | |
| 1908 | 1908_3 | [LR](A)[sP].[LR](T)[sP].[LR](A)[sP].[dR](T)[sP].[dR](T)[sP].[LR](T)[sP].[dR](T)[sP]. | | 87.4 | 67.6 |
| | | [dR](T)[sP].[dR](T)[sP].[dR](C)[sP].[dR](T)[sP].[dR](T)[sP].[dR](C)[sP].[dR](T)[sP]. | | | |
| | | [dR](C)[sP].[dR](T)[sP].[dR](T)[sP].[dR](T)[sP].[LR](T)[sP].[LR]([5meC]) | | | |
| 1908 | 1908_4 | [LR](A)[sP].[LR](T)[sP].[dR](A)[sP].[dR](T)[sP].[dR](T)[sP].[dR](T)[sP].[dR](T)[sP]. | | 91.3 | 72.1 |
| | | [LR](T)[sP].[dR](T)[sP].[dR](C)[sP].[LR](T)[sP].[dR](T)[sP].[dR](C)[sP].[dR](T)[sP]. | | | |
| | | [dR](C)[sP].[dR](T)[sP].[dR](T)[sP].[dR](T)[sP].[LR](T)[sP].[LR]([5meC]) | | | |
| 1908 | 1908_5 | [LR](A)[sP].[LR](T)[sP].[dR](A)[sP].[dR](T)[sP].[dR](T)[sP].[dR](T)[sP].[LR](T)[sP]. | | 94.3 | 76.1 |
| | | [dR](T)[sP].[dR](T)[sP].[dR](C)[sP].[LR](T)[sP].[dR](T)[sP].[dR](C)[sP].[dR](T)[sP]. | | | |
| | | [dR](C)[sP].[dR](T)[sP].[dR](T)[sP].[dR](T)[sP].[LR](T)[sP].[LR]([5meC]) | | | |
| 1908 | 1908_6 | [LR](A)[sP].[LR](T)[sP].[dR](A)[sP].[dR](T)[sP].[dR](T)[sP].[dR](T)[sP].[LR](T)[sP]. | | 85.4 | 68.3 |
| | | [LR](T)[sP].[dR](T)[sP].[dR](C)[sP].[dR](T)[sP].[dR](T)[sP].[dR](C)[sP].[dR](T)[sP]. | | | |
| | | [dR](C)[sP].[LR](T)[sP].[dR](T)[sP].[dR](T)[sP].[LR](T)[sP].[LR]([5meC]) | | | |
| 1989 | 1989_1 | [LR]([5meC])[sP].[LR](A)[sP].[LR](T)[sP].[dR](T)[sP].[LR]([5meC])[sP].[LR](A)[sP]. | | 57.5 | 60.6 |
| | | [dR](A)[sP].[dR](A)[sP].[dR](T)[sP].[dR](A)[sP].[dR](T)[sP].[dR](A)[sP].[LR](T)[sP]. | | | |
| | | [dR](A)[sP].[dR](C)[sP].[dR](A)[sP].[dR](T)[sP].[dR](T)[sP].[dR](T)[sP].[LR](T)[sP].[LR](T) | | | |
| 1989 | 1989_2 | [LR]([5meC])[sP].[LR](A)[sP].[LR](T)[sP].[dR](T)[sP].[LR]([5meC])[sP].[LR](A)[sP]. | | 62.6 | 64.4 |
| | | [dR](A)[sP].[dR](A)[sP].[dR](T)[sP].[dR](A)[sP].[dR](T)[sP].[LR](A)[sP].[LR](T)[sP]. | | | |
| | | [dR](A)[sP].[dR](C)[sP].[dR](A)[sP].[dR](T)[sP].[dR](T)[sP].[dR](T)[sP].[LR](T)[sP].[LR](T) | | | |
| 1989 | 1989_3 | [LR]([5meC])[sP].[LR](A)[sP].[dR](T)[sP].[LR](T)[sP].[dR](C)[sP].[dR](A)[sP].[dR](A)[sP]. | | 83.8 | 87.4 |
| | | [dR](A)[sP].[dR](T)[sP].[dR](A)[sP].[LR](T)[sP].[LR](A)[sP].[LR](T)[sP].[dR](A)[sP]. | | | |
| | | [dR](C)[sP].[dR](A)[sP].[dR](T)[sP].[dR](T)[sP].[dR](T)[sP].[LR](T)[sP].[LR](T) | | | |
| 1989 | 1989_4 | [LR]([5meC])[sP].[LR](A)[sP].[LR](T)[sP].[LR](T)[sP].[dR](C)[sP].[dR](A)[sP].[dR](A)[sP]. | | 85.8 | 74.5 |
| | | [dR](A)[sP].[dR](T)[sP].[LR](A)[sP].[LR](T)[sP].[dR](A)[sP].[LR](T)[sP].[dR](A)[sP]. | | | |
| | | [dR](C)[sP].[dR](A)[sP].[dR](T)[sP].[dR](T)[sP].[dR](T)[sP].[LR](T)[sP].[LR](T) | | | |
| 1989 | 1989_5 | [LR]([5meC])[sP].[LR](A)[sP].[LR](T)[sP].[dR](T)[sP].[dR](C)[sP].[dR](A)[sP].[dR](A)[sP]. | | 78.3 | 74 |
| | | [dR](A)[sP].[LR](T)[sP].[LR](A)[sP].[dR](T)[sP].[dR](A)[sP].[LR](T)[sP].[dR](A)[sP]. | | | |
| | | [dR](C)[sP].[dR](A)[sP].[dR](T)[sP].[dR](T)[sP].[dR](T)[sP].[LR](T)[sP].[LR](T) | | | |
| 1989 | 1989_6 | [LR]([5meC])[sP].[LR](A)[sP].[dR](T)[sP].[dR](T)[sP].[dR](C)[sP].[dR](A)[sP].[dR](A)[sP]. | | 99 | 82.2 |
| | | [LR](A)[sP].[LR](T)[sP].[LR](A)[sP].[LR](T)[sP].[dR](A)[sP].[LR](T)[sP].[dR](A)[sP]. | | | |
| | | [dR](C)[sP].[dR](A)[sP].[dR](T)[sP].[dR](T)[sP].[dR](T)[sP].[LR](T)[sP].[LR](T) | | | |
| 1989 | 1989_7 | [LR]([5meC])[sP].[LR](A)[sP].[dR](T)[sP].[dR](T)[sP].[LR]([5meC])[sP].[LR](A)[sP]. | | 85.9 | 81 |
| | | [dR](A)[sP].[dR](A)[sP].[LR](T)[sP].[LR](A)[sP].[dR](T)[sP].[dR](A)[sP].[dR](T)[sP]. | | | |
| | | [dR](A)[sP].[dR](C)[sP].[dR](A)[sP].[LR](T)[sP].[LR](T)[sP].[dR](T)[sP].[LR](T)[sP].[LR](T) | | | |
| 1990 | 1990_1 | [LR]([5meC])[sP].[LR](A)[sP].[dR](T)[sP].[dR](T)[sP].[dR](C)[sP].[dR](A)[sP].[dR](A)[sP]. | | 102 | 90.7 |
| | | [dR](A)[sP].[LR](T)[sP].[dR](A)[sP].[LR](T)[sP].[LR](A)[sP].[LR](T)[sP].[LR](A)[sP]. | | | |
| | | [dR](C)[sP].[LR](A)[sP].[LR](T)[sP].[dR](T)[sP].[LR](T)[sP].[LR](T) | | | |
| 1991 | 1991_1 | [LR]([5meC])[sP].[LR]([5meC])[sP].[dR](A)[sP].[LR](T)[sP].[LR](T)[sP].[dR](C)[sP]. | | 62.8 | 66.2 |
| | | [dR](A)[sP].[LR](A)[sP].[LR](A)[sP].[LR](T)[sP].[LR](A)[sP].[dR](T)[sP].[dR](A)[sP]. | | | |
| | | [dR](T)[sP].[dR](A)[sP].[dR](C)[sP].[dR](A)[sP].[dR](T)[sP].[LR](T)[sP].[LR](T) | | | |
| 1991 | 1991_2 | [LR]([5meC])[sP].[LR]([5meC])[sP].[LR](A)[sP].[dR](T)[sP].[LR](T)[sP].[dR](C)[sP]. | | 37.9 | 60.5 |
| | | [dR](A)[sP].[dR](A)[sP].[LR](A)[sP].[dR](T)[sP].[dR](A)[sP].[dR](T)[sP].[dR](A)[sP]. | | | |
| | | [dR](T)[sP].[dR](A)[sP].[dR](C)[sP].[dR](A)[sP].[LR](T)[sP].[LR](T)[sP].[LR](T) | | | |
| 1991 | 1991_3 | [LR]([5meC])[sP].[LR]([5meC])[sP].[dR](A)[sP].[dR](T)[sP].[dR](T)[sP].[dR](C)[sP]. | | 62.5 | 66.5 |
| | | [dR](A)[sP].[dR](A)[sP].[dR](A)[sP].[LR](T)[sP].[dR](A)[sP].[dR](T)[sP].[dR](A)[sP]. | | | |
| | | [LR](T)[sP].[dR](A)[sP].[dR](C)[sP].[dR](A)[sP].[LR](T)[sP].[LR](T)[sP].[LR](T) | | | |
| 1992 | 1992_1 | [LR](A)[sP].[LR](T)[sP].[dR](C)[sP].[LR]([5meC])[sP].[dR](A)[sP].[dR](T)[sP].[LR](T)[sP]. | | 74.8 | 88.8 |
| | | [LR]([5meC])[sP].[dR](A)[sP].[dR](A)[sP].[dR](A)[sP].[dR](T)[sP].[dR](A)[sP].[dR](T)[sP]. | | | |
| | | [dR](A)[sP].[LR](T)[sP].[LR](A)[sP].[dR](C)[sP].[LR](A)[sP].[LR](T) | | | |
| 1992 | 1992_2 | [LR](A)[sP].[LR](T)[sP].[dR](C)[sP].[LR]([5meC])[sP].[dR](A)[sP].[dR](T)[sP].[LR](T)[sP]. | | 76.3 | 82.5 |
| | | [LR]([5meC])[sP].[LR](A)[sP].[LR](A)[sP].[dR](A)[sP].[LR](T)[sP].[dR](A)[sP].[dR](T)[sP]. | | | |
| | | [dR](A)[sP].[dR](T)[sP].[dR](A)[sP].[dR](C)[sP].[LR](A)[sP].[LR](T) | | | |
| 1993 | 1993_1 | [LR](T)[sP].[LR](T)[sP].[LR](T)[sP].[dR](A)[sP].[dR](T)[sP].[LR]([5meC])[sP]. | | 67.4 | 71.7 |
| | | [LR]([5meC])[sP].[dR](A)[sP].[dR](T)[sP].[dR](T)[sP].[dR](C)[sP].[dR](A)[sP].[LR](A)[sP]. | | | |
| | | [dR](A)[sP].[dR](T)[sP].[dR](A)[sP].[dR](T)[sP].[dR](A)[sP].[dR](T)[sP].[LR](A)[sP]. | | | |
| | | [LR]([5meC]) | | | |
| 1993 | 1993_2 | [LR](T)[sP].[LR](T)[sP].[LR](T)[sP].[LR](A)[sP].[dR](T)[sP].[LR]([5meC])[sP].[dR](C)[sP]. | | 68.2 | 69.2 |
| | | [dR](A)[sP].[dR](T)[sP].[dR](T)[sP].[dR](C)[sP].[LR](A)[sP].[LR](A)[sP].[dR](A)[sP]. | | | |
| | | [dR](T)[sP].[dR](A)[sP].[dR](T)[sP].[dR](A)[sP].[dR](T)[sP].[LR](A)[sP].[LR]([5meC]) | | | |
| 1993 | 1993_3 | [LR](T)[sP].[LR](T)[sP].[LR](T)[sP].[LR](A)[sP].[dR](T)[sP].[dR](C)[sP].[dR](C)[sP]. | | 79.3 | 82.8 |
| | | [dR](A)[sP].[dR](T)[sP].[dR](T)[sP].[LR]([5meC])[sP].[LR](A)[sP].[LR](A)[sP].[dR](A)[sP]. | | | |
| | | [dR](T)[sP].[dR](A)[sP].[dR](T)[sP].[dR](A)[sP].[dR](T)[sP].[LR](A)[sP].[LR]([5meC]) | | | |
| 1993 | 1993_4 | [LR](T)[sP].[LR](T)[sP].[LR](T)[sP].[LR](A)[sP].[dR](T)[sP].[dR](C)[sP].[dR](C)[sP]. | | 67 | 71 |
| | | [dR](A)[sP].[dR](T)[sP].[LR](T)[sP].[LR]([5meC])[sP].[dR](A)[sP].[LR](A)[sP].[dR](A)[sP]. | | | |
| | | [dR](T)[sP].[dR](A)[sP].[dR](T)[sP].[dR](A)[sP].[dR](T)[sP].[LR](A)[sP].[LR]([5meC]) | | | |
| 1993 | 1993_5 | [LR](T)[sP].[LR](T)[sP].[LR](T)[sP].[dR](A)[sP].[dR](T)[sP].[dR](C)[sP].[dR](C)[sP]. | | 59.5 | 70.4 |
| | | [dR](A)[sP].[LR](T)[sP].[LR](T)[sP].[LR]([5meC])[sP].[dR](A)[sP].[LR](A)[sP].[dR](A)[sP]. | | | |
| | | [dR](T)[sP].[dR](A)[sP].[dR](T)[sP].[dR](A)[sP].[dR](T)[sP].[LR](A)[sP].[LR]([5meC]) | | | |
| 1993 | 1993_6 | [LR](T)[sP].[LR](T)[sP].[dR](T)[sP].[dR](A)[sP].[dR](T)[sP].[dR](C)[sP].[dR](C)[sP]. | | 49.5 | 56.2 |
| | | [LR](A)[sP].[LR](T)[sP].[LR](T)[sP].[LR]([5meC])[sP].[dR](A)[sP].[LR](A)[sP].[dR](A)[sP]. | | | |
| | | [dR](T)[sP].[dR](A)[sP].[dR](T)[sP].[dR](A)[sP].[dR](T)[sP].[LR](A)[sP].[LR]([5meC]) | | | |
| 1993 | 1993_7 | [LR](T)[sP].[LR](T)[sP].[dR](T)[sP].[LR](A)[sP].[dR](T)[sP].[dR](C)[sP].[dR](C)[sP]. | | 99.6 | 91.8 |
| | | [dR](A)[sP].[dR](T)[sP].[dR](T)[sP].[dR](C)[sP].[LR](A)[sP].[dR](A)[sP].[dR](A)[sP]. | | | |
| | | [LR](T)[sP].[LR](A)[sP].[LR](T)[sP].[LR](A)[sP].[dR](T)[sP].[LR](A)[sP].[LR]([5meC]) | | | |
| 1994 | 1994_1 | [LR](T)[sP].[LR](T)[sP].[dR](A)[sP].[LR](T)[sP].[dR](C)[sP].[LR]([5meC])[sP].[LR](A)[sP]. | | 82.8 | 86.8 |
| | | [dR](T)[sP].[dR](T)[sP].[LR]([5meC])[sP].[LR](A)[sP].[dR](A)[sP].[dR](A)[sP].[dR](T)[sP]. | | | |
| | | [dR](A)[sP].[dR](T)[sP].[dR](A)[sP].[LR](T)[sP].[LR](A) | | | |
| 1994 | 1994_2 | [LR](T)[sP].[LR](T)[sP].[LR](A)[sP].[LR](T)[sP].[dR](C)[sP].[LR]([5meC])[sP].[dR](A)[sP]. | | 99.4 | 96.1 |
| | | [dR](T)[sP].[dR](T)[sP].[dR](C)[sP].[dR](A)[sP].[dR](A)[sP].[dR](A)[sP].[LR](T)[sP]. | | | |
| | | [dR](A)[sP].[LR](T)[sP].[dR](A)[sP].[LR](T)[sP].[LR](A) | | | |
| 1995 | 1995_1 | [LR](T)[sP].[LR](T)[sP].[LR](T)[sP].[LR](A)[sP].[dR](T)[sP].[dR](C)[sP].[dR](C)[sP]. | | 103 | 93.9 |
| | | [dR](A)[sP].[dR](T)[sP].[dR](T)[sP].[dR](C)[sP].[LR](A)[sP].[LR](A)[sP].[LR](A)[sP]. | | | |
| | | [dR](T)[sP].[dR](A)[sP].[LR](T)[sP].[dR](A)[sP].[LR](T)[sP].[LR](A) | | | |
| 1995 | 1995_2 | [LR](T)[sP].[LR](T)[sP].[dR](T)[sP].[LR](A)[sP].[LR](T)[sP].[LR]([5meC])[sP].[dR](C)[sP]. | | 102 | 94.5 |
| | | [dR](A)[sP].[dR](T)[sP].[dR](T)[sP].[dR](C)[sP].[dR](A)[sP].[dR](A)[sP].[LR](A)[sP]. | | | |
| | | [LR](T)[sP].[dR](A)[sP].[dR](T)[sP].[LR](A)[sP].[LR](T)[sP].[LR](A) | | | |
| 1995 | 1995_3 | [LR](T)[sP].[LR](T)[sP].[dR](T)[sP].[dR](A)[sP].[dR](T)[sP].[dR](C)[sP].[dR](C)[sP]. | | 93.5 | 81.4 |
| | | [dR](A)[sP].[LR](T)[sP].[LR](T)[sP].[dR](C)[sP].[LR](A)[sP].[LR](A)[sP].[LR](A)[sP]. | | | |
| | | [LR](T)[sP].[dR](A)[sP].[dR](T)[sP].[dR](A)[sP].[LR](T)[sP].[LR](A) | | | |
| 1996 | 1996_1 | [LR](A)[sP].[LR](A)[sP].[LR](T)[sP].[LR](T)[sP].[dR](A)[sP].[LR](A)[sP].[dR](C)[sP]. | | 97.3 | 84.6 |
| | | [dR](A)[sP].[dR](T)[sP].[dR](C)[sP].[dR](A)[sP].[dR](T)[sP].[LR](T)[sP].[dR](T)[sP]. | | | |
| | | [dR](A)[sP].[dR](T)[sP].[dR](C)[sP].[dR](A)[sP].[dR](C)[sP].[LR](T)[sP].[LR](A) | | | |
| 1996 | 1996_2 | [LR](A)[sP].[LR](A)[sP].[dR](T)[sP].[LR](T)[sP].[LR](A)[sP].[dR](A)[sP].[dR](C)[sP]. | | 97.6 | 92.7 |
| | | [dR](A)[sP].[dR](T)[sP].[dR](C)[sP].[dR](A)[sP].[LR](T)[sP].[LR](T)[sP].[dR](T)[sP]. | | | |
| | | [dR](A)[sP].[dR](T)[sP].[dR](C)[sP].[dR](A)[sP].[dR](C)[sP].[LR](T)[sP].[LR](A) | | | |
| 1996 | 1996_3 | [LR](A)[sP].[LR](A)[sP].[LR](T)[sP].[LR](T)[sP].[dR](A)[sP].[dR](A)[sP].[dR](C)[sP]. | | 93.1 | 83.6 |
| | | [dR](A)[sP].[dR](T)[sP].[dR](C)[sP].[LR](A)[sP].[dR](T)[sP].[LR](T)[sP].[dR](T)[sP]. | | | |
| | | [dR](A)[sP].[dR](T)[sP].[dR](C)[sP].[dR](A)[sP].[dR](C)[sP].[LR](T)[sP].[LR](A) | | | |
| 1996 | 1996_4 | [LR](A)[sP].[LR](A)[sP].[LR](T)[sP].[LR](T)[sP].[dR](A)[sP].[dR](A)[sP].[dR](C)[sP]. | | 88.2 | 80.8 |
| | | [dR](A)[sP].[dR](T)[sP].[LR]([5meC])[sP].[dR](A)[sP].[dR](T)[sP].[LR](T)[sP].[dR](T)[sP]. | | | |
| | | [dR](A)[sP].[dR](T)[sP].[dR](C)[sP].[dR](A)[sP].[dR](C)[sP].[LR](T)[sP].[LR](A) | | | |
| 1996 | 1996_5 | [LR](A)[sP].[LR](A)[sP].[LR](T)[sP].[dR](T)[sP].[dR](A)[sP].[dR](A)[sP].[dR](C)[sP]. | | 75 | 84.7 |
| | | [dR](A)[sP].[LR](T)[sP].[LR]([5meC])[sP].[dR](A)[sP].[dR](T)[sP].[LR](T)[sP].[dR](T)[sP]. | | | |
| | | [dR](A)[sP].[dR](T)[sP].[dR](C)[sP].[dR](A)[sP].[dR](C)[sP].[LR](T)[sP].[LR](A) | | | |
| 1996 | 1996_6 | [LR](A)[sP].[LR](A)[sP].[dR](T)[sP].[dR](T)[sP].[dR](A)[sP].[dR](A)[sP].[dR](C)[sP]. | | 53.5 | 63.3 |
| | | [LR](A)[sP].[LR](T)[sP].[LR]([5meC])[sP].[dR](A)[sP].[dR](T)[sP].[LR](T)[sP].[dR](T)[sP]. | | | |
| | | [dR](A)[sP].[dR](T)[sP].[dR](C)[sP].[dR](A)[sP].[dR](C)[sP].[LR](T)[sP].[LR](A) | | | |
| 1996 | 1996_7 | [LR](A)[sP].[LR](A)[sP].[LR](T)[sP].[LR](T)[sP].[dR](A)[sP].[LR](A)[sP].[dR](C)[sP]. | | 92.2 | 86.6 |
| | | [LR](A)[sP].[LR](T)[sP].[dR](C)[sP].[LR](A)[sP].[dR](T)[sP].[dR](T)[sP].[dR](T)[sP]. | | | |
| | | [dR](A)[sP].[dR](T)[sP].[dR](C)[sP].[LR](A)[sP].[dR](C)[sP].[LR](T)[sP].[LR](A) | | | |
| 1996 | 1996_8 | [LR](A)[sP].[LR](A)[sP].[dR](T)[sP].[dR](T)[sP].[dR](A)[sP].[dR](A)[sP].[LR]([5meC])[sP]. | | 74.9 | 75.6 |
| | | [dR](A)[sP].[dR](T)[sP].[LR]([5meC])[sP].[dR](A)[sP].[LR](T)[sP].[dR](T)[sP].[dR](T)[sP]. | | | |
| | | [dR](A)[sP].[dR](T)[sP].[dR](C)[sP].[dR](A)[sP].[LR]([5meC])[sP].[LR](T)[sP].[LR](A) | | | |
| 1997 | 1997_1 | [LR](T)[sP].[LR](T)[sP].[dR](A)[sP].[dR](A)[sP].[dR](C)[sP].[dR](A)[sP].[dR](T)[sP]. | | 94.7 | 94.2 |
| | | [dR](C)[sP].[LR](A)[sP].[LR](T)[sP].[dR](T)[sP].[LR](T)[sP].[LR](A)[sP].[dR](T)[sP]. | | | |
| | | [LR]([5meC])[sP].[dR](A)[sP].[LR]([5meC])[sP].[LR](T) | | | |
| 1998 | 1998_1 | [LR](A)[sP].[LR](A)[sP].[LR](T)[sP].[dR](T)[sP].[dR](A)[sP].[dR](A)[sP].[dR](C)[sP]. | | 92.2 | 89.3 |
| | | [dR](A)[sP].[dR](T)[sP].[dR](C)[sP].[LR](A)[sP].[LR](T)[sP].[dR](T)[sP].[LR](T)[sP]. | | | |
| | | [LR](A)[sP].[LR](T)[sP].[LR]([5meC])[sP].[dR](A)[sP].[LR]([5meC])[sP].[LR](T) | | | |
| 1999 | 1999_1 | [LR]([5meC])[sP].[LR](T)[sP].[LR](A)[sP].[dR](A)[sP].[LR](T)[sP].[dR](T)[sP].[dR](A)[sP]. | | 89.6 | 83.8 |
| | | [dR](A)[sP].[dR](C)[sP].[dR](A)[sP].[dR](T)[sP].[LR]([5meC])[sP].[LR](A)[sP].[LR](T)[sP]. | | | |
| | | [LR](T)[sP].[dR](T)[sP].[dR](A)[sP].[LR](T)[sP].[LR]([5meC]) | | | |
| 2000 | 2000_1 | [LR]([5meC])[sP].[LR]([5meC])[sP].[LR]([5meC])[sP].[dR](T)[sP].[LR](A)[sP].[LR](A)[sP]. | | 90.3 | 92.8 |
| | | [dR](T)[sP].[dR](T)[sP].[dR](A)[sP].[dR](A)[sP].[dR](C)[sP].[dR](A)[sP].[dR](T)[sP]. | | | |
| | | [dR](C)[sP].[dR](A)[sP].[dR](T)[sP].[dR](T)[sP].[dR](T)[sP].[LR](A)[sP].[LR](T) | | | |
| 2000 | 2000_2 | [LR]([5meC])[sP].[LR]([5meC])[sP].[dR](C)[sP].[dR](T)[sP].[LR](A)[sP].[dR](A)[sP]. | | 90.5 | 89.7 |
| | | [dR](T)[sP].[dR](T)[sP].[dR](A)[sP].[dR](A)[sP].[dR](C)[sP].[LR](A)[sP].[dR](T)[sP]. | | | |
| | | [dR](C)[sP].[LR](A)[sP].[LR](T)[sP].[dR](T)[sP].[LR](T)[sP].[LR](A)[sP].[LR](T) | | | |
| 2001 | 2001_1 | [LR](A)[sP].[LR](T)[sP].[LR]([5meC])[sP].[LR](A)[sP].[dR](G)[sP].[dR](T)[sP].[dR](C)[sP]. | | 87.6 | 86.5 |
| | | [dR](C)[sP].[dR](A)[sP].[dR](A)[sP].[LR]([5meC])[sP].[LR](A)[sP].[LR](T)[sP].[dR](A)[sP]. | | | |
| | | [LR](A)[sP].[LR]([5meC]) | | | |
| 2001 | 2001_2 | [LR](A)[sP].[LR](T)[sP].[LR]([5meC])[sP].[dR](A)[sP].[LR](G)[sP].[LR](T)[sP]. | | 95.7 | 102 |
| | | [LR]([5meC])[sP].[dR](C)[sP].[dR](A)[sP].[dR](A)[sP].[dR](C)[sP].[dR](A)[sP].[dR](T)[sP]. | | | |
| | | [LR](A)[sP].[LR](A)[sP].[LR]([5meC]) | | | |
| 2002 | 2002_1 | [LR](T)[sP].[LR](A)[sP].[dR](T)[sP].[LR]([5meC])[sP].[LR](A)[sP].[dR](G)[sP].[LR](T)[sP]. | | 91.9 | 90.8 |
| | | [dR](C)[sP].[LR]([5meC])[sP].[dR](A)[sP].[dR](A)[sP].[dR](C)[sP].[dR](A)[sP].[dR](T)[sP]. | | | |
| | | [dR](A)[sP].[LR](A)[sP].[LR]([5meC]) | | | |
| 2002 | 2002_2 | [LR](T)[sP].[LR](A)[sP].[LR](T)[sP].[LR]([5meC])[sP].[dR](A)[sP].[dR](G)[sP].[dR](T)[sP]. | | 82.4 | 77 |
| | | [dR](C)[sP].[dR](C)[sP].[dR](A)[sP].[dR](A)[sP].[LR]([5meC])[sP].[dR](A)[sP].[LR](T)[sP]. | | | |
| | | [dR](A)[sP].[LR](A)[sP].[LR]([5meC]) | | | |
| 2002 | 2002_3 | [LR](T)[sP].[LR](A)[sP].[LR](T)[sP].[LR]([5meC])[sP].[dR](A)[sP].[dR](G)[sP].[dR](T)[sP]. | | 98.1 | 96.2 |
| | | [dR](C)[sP].[dR](C)[sP].[dR](A)[sP].[LR](A)[sP].[LR]([5meC])[sP].[LR](A)[sP].[dR](T)[sP]. | | | |
| | | [dR](A)[sP].[LR](A)[sP].[LR]([5meC]) | | | |
| 2002 | 2002_4 | [LR](T)[sP].[LR](A)[sP].[LR](T)[sP].[dR](C)[sP].[dR](A)[sP].[dR](G)[sP].[dR](T)[sP]. | | 79.9 | 81.9 |
| | | [dR](C)[sP].[dR](C)[sP].[dR](A)[sP].[dR](A)[sP].[LR]([5meC])[sP].[LR](A)[sP].[LR](T)[sP]. | | | |
| | | [dR](A)[sP].[LR](A)[sP].[LR]([5meC]) | | | |
| 2002 | 2002_5 | [LR](T)[sP].[LR](A)[sP].[dR](T)[sP].[dR](C)[sP].[dR](A)[sP].[dR](G)[sP].[dR](T)[sP]. | | 92.9 | 86.2 |
| | | [dR](C)[sP].[LR]([5meC])[sP].[LR](A)[sP].[LR](A)[sP].[dR](C)[sP].[dR](A)[sP].[LR](T)[sP]. | | | |
| | | [LR](A)[sP].[LR](A)[sP].[LR]([5meC]) | | | |
| 2003 | 2003_1 | [LR]([5meC])[sP].[LR](T)[sP].[dR](T)[sP].[dR](C)[sP].[dR](A)[sP].[dR](T)[sP].[dR](T)[sP]. | | 75.1 | 68.7 |
| | | [dR](A)[sP].[dR](T)[sP].[LR](A)[sP].[LR]([5meC])[sP].[dR](C)[sP].[LR](A)[sP].[dR](T)[sP]. | | | |
| | | [LR]([5meC])[sP].[LR](A)[sP].[dR](A)[sP].[LR](A)[sP].[LR](T) | | | |
| 2003 | 2003_2 | [LR]([5meC])[sP].[LR](T)[sP].[LR](T)[sP].[dR](C)[sP].[LR](A)[sP].[dR](T)[sP].[dR](T)[sP]. | | 74.3 | 73.2 |
| | | [dR](A)[sP].[dR](T)[sP].[dR](A)[sP].[dR](C)[sP].[LR]([5meC])[sP].[LR](A)[sP].[LR](T)[sP]. | | | |
| | | [LR]([5meC])[sP].[dR](A)[sP].[LR](A)[sP].[LR](A)[sP].[LR](T) | | | |
| 2003 | 2003_3 | [LR]([5meC])[sP].[LR](T)[sP].[dR](T)[sP].[LR]([5meC])[sP].[LR](A)[sP].[LR](T)[sP]. | | 84.9 | 74.8 |
| | | [dR](T)[sP].[dR](A)[sP].[LR](T)[sP].[dR](A)[sP].[dR](C)[sP].[dR](C)[sP].[dR](A)[sP]. | | | |
| | | [dR](T)[sP].[dR](C)[sP].[LR](A)[sP].[dR](A)[sP].[LR](A)[sP].[LR](T) | | | |
| 2003 | 2003_4 | [LR]([5meC])[sP].[LR](T)[sP].[LR](T)[sP].[dR](C)[sP].[dR](A)[sP].[dR](T)[sP].[dR](T)[sP]. | | 82.9 | 77.5 |
| | | [dR](A)[sP].[dR](T)[sP].[LR](A)[sP].[dR](C)[sP].[LR]([5meC])[sP].[dR](A)[sP].[dR](T)[sP]. | | | |
| | | [LR]([5meC])[sP].[dR](A)[sP].[LR](A)[sP].[LR](A)[sP].[LR](T) | | | |
| 2004 | 2004_1 | [LR](T)[sP].[LR](T)[sP].[dR](C)[sP].[LR](T)[sP].[LR](T)[sP].[dR](C)[sP].[dR](A)[sP]. | | 42 | 53 |
| | | [dR](T)[sP].[dR](T)[sP].[dR](A)[sP].[dR](T)[sP].[dR](A)[sP].[dR](C)[sP].[LR]([5meC])[sP]. | | | |
| | | [LR](A)[sP].[LR](T)[sP].[dR](C)[sP].[dR](A)[sP].[LR](A)[sP].[LR](A) | | | |
| 2004 | 2004_2 | [LR](T)[sP].[LR](T)[sP].[dR](C)[sP].[dR](T)[sP].[dR](T)[sP].[LR]([5meC])[sP].[LR](A)[sP]. | | 44.7 | 47.6 |
| | | [LR](T)[sP].[dR](T)[sP].[dR](A)[sP].[LR](T)[sP].[dR](A)[sP].[dR](C)[sP].[dR](C)[sP]. | | | |
| | | [dR](A)[sP].[dR](T)[sP].[dR](C)[sP].[LR](A)[sP].[LR](A)[sP].[LR](A) | | | |
| 2004 | 2004_3 | [LR](T)[sP].[LR](T)[sP].[LR]([5meC])[sP].[dR](T)[sP].[LR](T)[sP].[dR](C)[sP].[LR](A)[sP]. | | 91.6 | 84.5 |
| | | [LR](T)[sP].[dR](T)[sP].[LR](A)[sP].[dR](T)[sP].[dR](A)[sP].[dR](C)[sP].[dR](C)[sP]. | | | |
| | | [dR](A)[sP].[dR](T)[sP].[dR](C)[sP].[LR](A)[sP].[LR](A)[sP].[LR](A) | | | |
| 2005 | 2005_1 | [LR](A)[sP].[LR](A)[sP].[dR](A)[sP].[dR](T)[sP].[dR](A)[sP].[dR](T)[sP].[dR](T)[sP]. | | 74.3 | 68.7 |
| | | [dR](T)[sP].[dR](T)[sP].[LR]([5meC])[sP].[dR](T)[sP].[LR](T)[sP].[LR]([5meC])[sP]. | | | |
| | | [dR](A)[sP].[LR](T)[sP].[LR](T)[sP].[dR](A)[sP].[LR](T)[sP].[LR](A)[sP].[LR]([5meC]) | | | |
| 2006 | 2006_1 | [LR](A)[sP].[LR](A)[sP].[dR](T)[sP].[dR](T)[sP].[dR](T)[sP].[dR](T)[sP].[dR](C)[sP]. | | 86.4 | 72.4 |
| | | [dR](C)[sP].[LR](T)[sP].[dR](T)[sP].[dR](C)[sP].[dR](A)[sP].[dR](T)[sP].[dR](C)[sP]. | | | |
| | | [dR](T)[sP].[dR](A)[sP].[dR](C)[sP].[LR](T)[sP].[dR](T)[sP].[LR]([5meC])[sP].[LR](T) | | | |
| 2006 | 2006_2 | [LR](A)[sP].[LR](A)[sP].[dR](T)[sP].[dR](T)[sP].[dR](T)[sP].[dR](T)[sP].[dR](C)[sP]. | | 63.3 | 56.4 |
| | | [dR](C)[sP].[LR](T)[sP].[dR](T)[sP].[LR]([5meC])[sP].[dR](A)[sP].[dR](T)[sP].[dR](C)[sP]. | | | |
| | | [dR](T)[sP].[dR](A)[sP].[dR](C)[sP].[LR](T)[sP].[dR](T)[sP].[LR]([5meC])[sP].[LR](T) | | | |
| 2006 | 2006_3 | [LR](A)[sP].[LR](A)[sP].[dR](T)[sP].[dR](T)[sP].[dR](T)[sP].[dR](T)[sP].[dR](C)[sP]. | | 71.1 | 65.9 |
| | | [LR]([5meC])[sP].[dR](T)[sP].[dR](T)[sP].[LR]([5meC])[sP].[dR](A)[sP].[dR](T)[sP]. | | | |
| | | [dR](C)[sP].[dR](T)[sP].[dR](A)[sP].[dR](C)[sP].[dR](T)[sP].[dR](T)[sP].[LR]([5meC])[sP]. | | | |
| | | [LR](T) | | | |
| 2006 | 2006_4 | [LR](A)[sP].[LR](A)[sP].[dR](T)[sP].[dR](T)[sP].[dR](T)[sP].[dR](T)[sP].[dR](C)[sP]. | | 87.7 | 78.2 |
| | | [dR](C)[sP].[LR](T)[sP].[dR](T)[sP].[dR](C)[sP].[dR](A)[sP].[dR](T)[sP].[LR]([5meC])[sP]. | | | |
| | | [dR](T)[sP].[dR](A)[sP].[dR](C)[sP].[dR](T)[sP].[dR](T)[sP].[LR]([5meC])[sP].[LR](T) | | | |
| 2006 | 2006_5 | [LR](A)[sP].[LR](A)[sP].[dR](T)[sP].[dR](T)[sP].[dR](T)[sP].[dR](T)[sP].[dR](C)[sP]. | 86.8 | | 68.7 |
| | | [dR](C)[sP].[dR](T)[sP].[dR](T)[sP].[dR](C)[sP].[dR](A)[sP].[dR](T)[sP].[dR](C)[sP]. | | | |
| | | [dR](T)[sP].[dR](A)[sP].[dR](C)[sP].[LR](T)[sP].[dR](T)[sP].[LR]([5meC])[sP].[LR](T) | | | |
| 2006 | 2006_6 | [LR](A)[sP].[LR](A)[sP].[dR](T)[sP].[dR](T)[sP].[dR](T)[sP].[dR](T)[sP].[dR](C)[sP]. | 81.5 | | 79.7 |
| | | [dR](C)[sP].[dR](T)[sP].[dR](T)[sP].[dR](C)[sP].[dR](A)[sP].[dR](T)[sP].[dR](C)[sP]. | | | |
| | | [dR](T)[sP].[dR](A)[sP].[dR](C)[sP].[dR](T)[sP].[dR](T)[sP].[LR]([5meC])[sP].[LR](T) | | | |
| 2007 | 2007_1 | [LR](T)[sP].[LR](T)[sP].[LR](A)[sP].[dR](C)[sP].[LR](A)[sP].[dR](A)[sP].[dR](A)[sP]. | | 89.1 | 85.3 |
| | | [dR](A)[sP].[dR](T)[sP].[dR](A)[sP].[dR](A)[sP].[LR](T)[sP].[dR](C)[sP].[LR]([5meC])[sP]. | | | |
| | | [LR](A)[sP].[dR](A)[sP].[dR](A)[sP].[LR]([5meC])[sP].[LR](T)[sP].[LR](T) | | | |
| 2007 | 2007_2 | [LR](T)[sP].[LR](T)[sP].[LR](A)[sP].[dR](C)[sP].[dR](A)[sP].[dR](A)[sP].[dR](A)[sP]. | | 97.4 | 103 |
| | | [dR](A)[sP].[dR](T)[sP].[LR](A)[sP].[dR](A)[sP].[LR](T)[sP].[LR]([5meC])[sP]. | | | |
| | | [LR]([5meC])[sP].[dR](A)[sP].[LR](A)[sP].[LR](A)[sP].[dR](C)[sP].[LR](T)[sP].[LR](T) | | | |
| 2007 | 2007_3 | [LR](T)[sP].[LR](T)[sP].[LR](A)[sP].[dR](C)[sP].[LR](A)[sP].[dR](A)[sP].[dR](A)[sP]. | | 69.7 | 77.1 |
| | | [dR](A)[sP].[dR](T)[sP].[dR](A)[sP].[dR](A)[sP].[dR](T)[sP].[LR]([5meC])[sP]. | | | |
| | | [LR]([5meC])[sP].[LR](A)[sP].[dR](A)[sP].[LR](A)[sP].[LR]([5meC])[sP].[LR](T)[sP].[LR](T) | | | |
| 2007 | 2007_4 | [LR](T)[sP].[LR](T)[sP].[dR](A)[sP].[LR]([5meC])[sP].[dR](A)[sP].[LR](A)[sP].[dR](A)[sP]. | | 88.3 | 93.1 |
| | | [dR](A)[sP].[dR](T)[sP].[dR](A)[sP].[dR](A)[sP].[dR](T)[sP].[LR]([5meC])[sP]. | | | |
| | | [LR]([5meC])[sP].[LR](A)[sP].[LR](A)[sP].[dR](A)[sP].[LR]([5meC])[sP].[LR](T)[sP].[LR](T) | | | |
| 2007 | 2007_5 | [LR](T)[sP].[LR](T)[sP].[dR](A)[sP].[dR](C)[sP].[dR](A)[sP].[dR](A)[sP].[dR](A)[sP]. | | 75.2 | 83 |
| | | [dR](A)[sP].[LR](T)[sP].[LR](A)[sP].[dR](A)[sP].[LR](T)[sP].[LR]([5meC])[sP].[dR](C)[sP]. | | | |
| | | [dR](A)[sP].[dR](A)[sP].[LR](A)[sP].[LR]([5meC])[sP].[LR](T)[sP].[LR](T) | | | |
| 2007 | 2007_6 | [LR](T)[sP].[LR](T)[sP].[dR](A)[sP].[LR]([5meC])[sP].[LR](A)[sP].[LR](A)[sP].[LR](A)[sP]. | | 69.3 | 72.7 |
| | | [dR](A)[sP].[LR](T)[sP].[LR](A)[sP].[LR](A)[sP].[dR](T)[sP].[dR](C)[sP].[dR](C)[sP]. | | | |
| | | [dR](A)[sP].[dR](A)[sP].[dR](A)[sP].[dR](C)[sP].[LR](T)[sP].[LR](T) | | | |
| 2007 | 2007_7 | [LR](T)[sP].[LR](T)[sP].[dR](A)[sP].[LR]([5meC])[sP].[dR](A)[sP].[dR](A)[sP].[dR](A)[sP]. | | 87.3 | 87.1 |
| | | [dR](A)[sP].[dR](T)[sP].[dR](A)[sP].[LR](A)[sP].[dR](T)[sP].[LR]([5meC])[sP]. | | | |
| | | [LR]([5meC])[sP].[LR](A)[sP].[dR](A)[sP].[dR](A)[sP].[LR]([5meC])[sP].[LR](T)[sP].[LR](T) | | | |
| 2007 | 2007_8 | [LR](T)[sP].[LR](T)[sP].[LR](A)[sP].[dR](C)[sP].[LR](A)[sP].[LR](A)[sP].[dR](A)[sP]. | | 81.3 | 82.8 |
| | | [dR](A)[sP].[dR](T)[sP].[dR](A)[sP].[dR](A)[sP].[dR](T)[sP].[LR]([5meC])[sP]. | | | |
| | | [LR]([5meC])[sP].[dR](A)[sP].[dR](A)[sP].[LR](A)[sP].[LR]([5meC])[sP].[LR](T)[sP].[LR](T) | | | |
| 2007 | 2007_9 | [LR](T)[sP].[LR](T)[sP].[LR](A)[sP].[LR]([5meC])[sP].[dR](A)[sP].[LR](A)[sP].[LR](A)[sP]. | | 81.2 | 82.8 |
| | | [dR](A)[sP].[LR](T)[sP].[LR](A)[sP].[dR](A)[sP].[dR](T)[sP].[dR](C)[sP].[dR](C)[sP]. | | | |
| | | [dR](A)[sP].[dR](A)[sP].[LR](A)[sP].[dR](C)[sP].[LR](T)[sP].[LR](T) | | | |
| 2008 | 2008_1 | [LR](T)[sP].[LR](A)[sP].[LR]([5meC])[sP].[LR](A)[sP].[dR](A)[sP].[LR](A)[sP].[LR](A)[sP]. | | 76.7 | 74.4 |
| | | [LR](T)[sP].[LR](A)[sP].[dR](A)[sP].[dR](T)[sP].[dR](C)[sP].[dR](C)[sP].[dR](A)[sP]. | | | |
| | | [dR](A)[sP].[dR](A)[sP].[LR]([5meC])[sP].[LR](T)[sP].[LR](T) | | | |
| 2008 | 2008_2 | [LR](T)[sP].[LR](A)[sP].[LR]([5meC])[sP].[LR](A)[sP].[dR](A)[sP].[dR](A)[sP].[dR](A)[sP]. | | 60.1 | 72.2 |
| | | [dR](T)[sP].[dR](A)[sP].[dR](A)[sP].[dR](T)[sP].[LR]([5meC])[sP].[LR]([5meC])[sP]. | | | |
| | | [LR](A)[sP].[LR](A)[sP].[dR](A)[sP].[dR](C)[sP].[LR](T)[sP].[LR](T) | | | |
| 2009 | 2009_1 | [LR](A)[sP].[LR]([5meC])[sP].[LR](A)[sP].[dR](A)[sP].[dR](A)[sP].[dR](A)[sP].[dR](T)[sP]. | | 96.6 | 98 |
| | | [dR](A)[sP].[dR](A)[sP].[LR](T)[sP].[LR]([5meC])[sP].[LR]([5meC])[sP].[LR](A)[sP]. | | | |
| | | [dR](A)[sP].[LR](A)[sP].[dR](C)[sP].[LR](T)[sP].[LR](T) | | | |
| 2010 | 2010_1 | [LR](T)[sP].[LR](A)[sP].[LR]([5meC])[sP].[LR](A)[sP].[dR](A)[sP].[dR](A)[sP].[dR](A)[sP]. | | 94.9 | 100 |
| | | [dR](T)[sP].[dR](A)[sP].[dR](A)[sP].[LR](T)[sP].[LR]([5meC])[sP].[LR]([5meC])[sP]. | | | |
| | | [LR](A)[sP].[dR](A)[sP].[LR](A)[sP].[LR]([5meC])[sP].[LR](T) | | | |
| 2011 | 2011_1 | [LR](T)[sP].[LR](T)[sP].[dR](A)[sP].[LR]([5meC])[sP].[LR](A)[sP].[dR](A)[sP].[dR](A)[sP]. | | 68.6 | 81.5 |
| | | [dR](A)[sP].[dR](T)[sP].[dR](A)[sP].[dR](A)[sP].[dR](T)[sP].[LR]([5meC])[sP]. | | | |
| | | [LR]([5meC])[sP].[dR](A)[sP].[LR](A)[sP].[LR](A)[sP].[LR]([5meC])[sP].[LR](T) | | | |
| 2011 | 2011_2 | [LR](T)[sP].[LR](T)[sP].[LR](A)[sP].[LR]([5meC])[sP].[dR](A)[sP].[LR](A)[sP].[dR](A)[sP]. | | 86.3 | 86.5 |
| | | [dR](A)[sP].[dR](T)[sP].[dR](A)[sP].[dR](A)[sP].[dR](T)[sP].[LR]([5meC])[sP]. | | | |
| | | [LR]([5meC])[sP].[LR](A)[sP].[dR](A)[sP].[dR](A)[sP].[LR]([5meC])[sP].[LR](T) | | | |
| 2011 | 2011_3 | [LR](T)[sP].[LR](T)[sP].[LR](A)[sP].[LR]([5meC])[sP].[dR](A)[sP].[LR](A)[sP].[dR](A)[sP]. | | 68.4 | 75.7 |
| | | [dR](A)[sP].[dR](T)[sP].[dR](A)[sP].[dR](A)[sP].[dR](T)[sP].[dR](C)[sP].[LR]([5meC])[sP]. | | | |
| | | [LR](A)[sP].[dR](A)[sP].[LR](A)[sP].[LR]([5meC])[sP].[LR](T) | | | |
| 2011 | 2011_4 | [LR](T)[sP].[LR](T)[sP].[LR](A)[sP].[LR]([5meC])[sP].[dR](A)[sP].[dR](A)[sP].[dR](A)[sP]. | | 89.6 | 88.9 |
| | | [dR](A)[sP].[dR](T)[sP].[dR](A)[sP].[LR](A)[sP].[LR](T)[sP].[LR]([5meC])[sP].[dR](C)[sP]. | | | |
| | | [dR](A)[sP].[LR](A)[sP].[dR](A)[sP].[LR]([5meC])[sP].[LR](T) | | | |
| 2011 | 2011_5 | [LR](T)[sP].[LR](T)[sP].[LR](A)[sP].[LR]([5meC])[sP].[dR](A)[sP].[LR](A)[sP].[dR](A)[sP]. | | 78.1 | 83.5 |
| | | [dR](A)[sP].[dR](T)[sP].[dR](A)[sP].[dR](A)[sP].[dR](T)[sP].[LR]([5meC])[sP]. | | | |
| | | [LR]([5meC])[sP].[dR](A)[sP].[dR](A)[sP].[dR](A)[sP].[LR]([5meC])[sP].[LR](T) | | | |
| 2012 | 2012_1 | [LR](G)[sP].[LR](T)[sP].[LR](T)[sP].[dR](A)[sP].[dR](C)[sP].[dR](A)[sP].[dR](A)[sP]. | | 84.5 | 87.5 |
| | | [dR](A)[sP].[dR](A)[sP].[LR](T)[sP].[dR](A)[sP].[dR](A)[sP].[dR](T)[sP].[LR]([5meC])[sP]. | | | |
| | | [LR]([5meC])[sP].[LR](A)[sP].[dR](A)[sP].[LR](A)[sP].[LR]([5meC]) | | | |
| 2012 | 2012_2 | [LR](G)[sP].[LR](T)[sP].[dR](T)[sP].[dR](A)[sP].[dR](C)[sP].[dR](A)[sP].[dR](A)[sP]. | | 70 | 86 |
| | | [dR](A)[sP].[LR](A)[sP].[LR](T)[sP].[dR](A)[sP].[dR](A)[sP].[LR](T)[sP].[LR]([5meC])[sP]. | | | |
| | | [LR]([5meC])[sP].[dR](A)[sP].[dR](A)[sP].[LR](A)[sP].[LR]([5meC]) | | | |
| 2012 | 2012_3 | [LR](G)[sP].[LR](T)[sP].[dR](T)[sP].[dR](A)[sP].[dR](C)[sP].[dR](A)[sP].[dR](A)[sP]. | | 72.5 | 84.7 |
| | | [dR](A)[sP].[dR](A)[sP].[dR](T)[sP].[LR](A)[sP].[dR](A)[sP].[LR](T)[sP].[LR]([5meC])[sP]. | | | |
| | | [LR]([5meC])[sP].[LR](A)[sP].[dR](A)[sP].[LR](A)[sP].[LR]([5meC]) | | | |
| 2012 | 2012_4 | [LR](G)[sP].[LR](T)[sP].[LR](T)[sP].[dR](A)[sP].[dR](C)[sP].[LR](A)[sP].[dR](A)[sP]. | | 74.5 | 79.8 |
| | | [dR](A)[sP].[dR](A)[sP].[dR](T)[sP].[dR](A)[sP].[dR](A)[sP].[dR](T)[sP].[LR]([5meC])[sP]. | | | |
| | | [LR]([5meC])[sP].[LR](A)[sP].[dR](A)[sP].[LR](A)[sP].[LR]([5meC]) | | | |
| 2012 | 2012_5 | [LR](G)[sP].[LR](T)[sP].[LR](T)[sP].[LR](A)[sP].[dR](C)[sP].[dR](A)[sP].[LR](A)[sP]. | | 87.1 | 81.9 |
| | | [dR](A)[sP].[LR](A)[sP].[LR](T)[sP].[LR](A)[sP].[dR](A)[sP].[dR](T)[sP].[dR](C)[sP]. | | | |
| | | [dR](C)[sP].[dR](A)[sP].[dR](A)[sP].[LR](A)[sP].[LR]([5meC]) | | | |
| 2012 | 2012_6 | [LR](G)[sP].[LR](T)[sP].[LR](T)[sP].[LR](A)[sP].[dR](C)[sP].[dR](A)[sP].[dR](A)[sP]. | | 75.1 | 79.8 |
| | | [dR](A)[sP].[dR](A)[sP].[dR](T)[sP].[dR](A)[sP].[dR](A)[sP].[dR](T)[sP].[LR]([5meC])[sP]. | | | |
| | | [LR]([5meC])[sP].[dR](A)[sP].[LR](A)[sP].[LR](A)[sP].[LR]([5meC]) | | | |
| 2013 | 2013_1 | [LR](T)[sP].[LR](G)[sP].[dR](T)[sP].[LR](T)[sP].[LR](A)[sP].[LR]([5meC])[sP].[dR](A)[sP]. | | 95.6 | 87 |
| | | [dR](A)[sP].[dR](A)[sP].[dR](A)[sP].[dR](T)[sP].[dR](A)[sP].[dR](A)[sP].[LR](T)[sP]. | | | |
| | | [LR]([5meC])[sP].[LR]([5meC])[sP].[dR](A)[sP].[LR](A)[sP].[LR](A) | | | |
| 2013 | 2013_2 | [LR](T)[sP].[LR](G)[sP].[LR](T)[sP].[LR](T)[sP].[dR](A)[sP].[dR](C)[sP].[LR](A)[sP]. | | 93.2 | 87.4 |
| | | [dR](A)[sP].[dR](A)[sP].[dR](A)[sP].[dR](T)[sP].[dR](A)[sP].[dR](A)[sP].[LR](T)[sP]. | | | |
| | | [LR]([5meC])[sP].[LR]([5meC])[sP].[dR](A)[sP].[LR](A)[sP].[LR](A) | | | |
| 2014 | 2014_1 | [LR](T)[sP].[LR](T)[sP].[dR](T)[sP].[dR](C)[sP].[LR]([5meC])[sP].[dR](T)[sP].[dR](C)[sP]. | | 89 | 86.7 |
| | | [LR]([5meC])[sP].[dR](T)[sP].[dR](C)[sP].[dR](A)[sP].[dR](A)[sP].[dR](T)[sP].[dR](C)[sP]. | | | |
| | | [dR](A)[sP].[dR](A)[sP].[LR](T)[sP].[LR]([5meC]) | | | |
| 2014 | 2014_2 | [LR](T)[sP].[LR](T)[sP].[dR](T)[sP].[LR]([5meC])[sP].[dR](C)[sP].[dR](T)[sP]. | | 85.4 | 76.4 |
| | | [LR]([5meC])[sP].[dR](C)[sP].[dR](T)[sP].[dR](C)[sP].[dR](A)[sP].[dR](A)[sP].[dR](T)[sP]. | | | |
| | | [dR](C)[sP].[dR](A)[sP].[LR](A)[sP].[LR](T)[sP].[LR]([5meC]) | | | |
| 2014 | 2014_3 | [LR](T)[sP].[LR](T)[sP].[dR](T)[sP].[dR](C)[sP].[LR]([5meC])[sP].[dR](T)[sP].[dR](C)[sP]. | | 91 | 88.1 |
| | | [LR]([5meC])[sP].[dR](T)[sP].[dR](C)[sP].[dR](A)[sP].[dR](A)[sP].[dR](T)[sP].[dR](C)[sP]. | | | |
| | | [LR](A)[sP].[dR](A)[sP].[LR](T)[sP].[LR]([5meC]) | | | |
| 2014 | 2014_4 | [LR](T)[sP].[LR](T)[sP].[dR](T)[sP].[dR](C)[sP].[LR]([5meC])[sP].[dR](T)[sP]. | | 87.8 | 81.7 |
| | | [LR]([5meC])[sP].[dR](C)[sP].[dR](T)[sP].[dR](C)[sP].[dR](A)[sP].[dR](A)[sP].[dR](T)[sP]. | | | |
| | | [dR](C)[sP].[LR](A)[sP].[dR](A)[sP].[LR](T)[sP].[LR]([5meC]) | | | |
| 2014 | 2014_5 | [LR](T)[sP].[LR](T)[sP].[dR](T)[sP].[dR](C)[sP].[LR]([5meC])[sP].[dR](T)[sP]. | | 90.9 | 84.1 |
| | | [LR]([5meC])[sP].[dR](C)[sP].[dR](T)[sP].[dR](C)[sP].[dR](A)[sP].[dR](A)[sP].[dR](T)[sP]. | | | |
| | | [dR](C)[sP].[dR](A)[sP].[dR](A)[sP].[LR](T)[sP].[LR]([5meC]) | | | |
| 2014 | 2014_6 | [LR](T)[sP].[LR](T)[sP].[dR](T)[sP].[LR]([5meC])[sP].[dR](C)[sP].[dR](T)[sP].[dR](C)[sP]. | | 87.1 | 81.2 |
| | | [LR]([5meC])[sP].[dR](T)[sP].[dR](C)[sP].[dR](A)[sP].[dR](A)[sP].[dR](T)[sP].[dR](C)[sP]. | | | |
| | | [LR](A)[sP].[dR](A)[sP].[LR](T)[sP].[LR]([5meC]) | | | |
| 2014 | 2014_7 | [LR](T)[sP].[LR](T)[sP].[dR](T)[sP].[LR]([5meC])[sP].[dR](C)[sP].[dR](T)[sP].[dR](C)[sP]. | | 92.7 | 82 |
| | | [LR]([5meC])[sP].[dR](T)[sP].[dR](C)[sP].[dR](A)[sP].[dR](A)[sP].[dR](T)[sP].[dR](C)[sP]. | | | |
| | | [LR](A)[sP].[LR](A)[sP].[LR](T)[sP].[LR]([5meC]) | | | |
| 2015 | 2015_1 | [LR](T)[sP].[LR](T)[sP].[LR]([5meC])[sP].[dR](C)[sP].[dR](T)[sP].[dR](C)[sP]. | | 86.5 | 77.8 |
| | | [LR]([5meC])[sP].[dR](T)[sP].[dR](C)[sP].[dR](A)[sP].[dR](A)[sP].[dR](T)[sP].[dR](C)[sP]. | | | |
| | | [dR](A)[sP].[dR](A)[sP].[LR](T)[sP].[LR]([5meC]) | | | |
| 2016 | 2016_1 | [LR]([5meC])[sP].[LR](T)[sP].[dR](T)[sP].[dR](T)[sP].[LR]([5meC])[sP].[dR](C)[sP]. | | 80.7 | 73.7 |
| | | [dR](T)[sP].[LR]([5meC])[sP].[dR](C)[sP].[dR](T)[sP].[dR](C)[sP].[dR](A)[sP].[dR](A)[sP]. | | | |
| | | [dR](T)[sP].[dR](C)[sP].[dR](A)[sP].[LR](A)[sP].[LR](T) | | | |
| 2016 | 2016_2 | [LR]([5meC])[sP].[LR](T)[sP].[dR](T)[sP].[dR](T)[sP].[LR]([5meC])[sP].[dR](C)[sP]. | | 74.6 | 71.8 |
| | | [dR](T)[sP].[LR]([5meC])[sP].[dR](C)[sP].[dR](T)[sP].[dR](C)[sP].[dR](A)[sP].[dR](A)[sP]. | | | |
| | | [dR](T)[sP].[dR](C)[sP].[LR](A)[sP].[LR](A)[sP].[LR](T) | | | |
| 2016 | 2016_3 | [LR]([5meC])[sP].[LR](T)[sP].[dR](T)[sP].[dR](T)[sP].[dR](C)[sP].[LR]([5meC])[sP]. | | 90.9 | 86.4 |
| | | [dR](T)[sP].[dR](C)[sP].[LR]([5meC])[sP].[dR](T)[sP].[dR](C)[sP].[dR](A)[sP].[dR](A)[sP]. | | | |
| | | [dR](T)[sP].[dR](C)[sP].[LR](A)[sP].[LR](A)[sP].[LR](T) | | | |
| 2017 | 2017_1 | [LR](A)[sP].[LR]([5meC])[sP].[dR](T)[sP].[dR](T)[sP].[dR](T)[sP].[LR]([5meC])[sP]. | | 78 | 77.1 |
| | | [dR](C)[sP].[LR](T)[sP].[LR]([5meC])[sP].[dR](C)[sP].[dR](T)[sP].[dR](C)[sP].[dR](A)[sP]. | | | |
| | | [dR](A)[sP].[dR](T)[sP].[dR](C)[sP].[LR](A)[sP].[LR](A) | | | |
| 2017 | 2017_2 | [LR](A)[sP].[LR]([5meC])[sP].[dR](T)[sP].[dR](T)[sP].[dR](T)[sP].[dR](C)[sP]. | | 84.9 | 85.2 |
| | | [LR]([5meC])[sP].[dR](T)[sP].[dR](C)[sP].[LR]([5meC])[sP].[dR](T)[sP].[dR](C)[sP]. | | | |
| | | [dR](A)[sP].[dR](A)[sP].[dR](T)[sP].[dR](C)[sP].[LR](A)[sP].[LR](A) | | | |
| 2018 | 2018_1 | [LR](A)[sP].[LR](G)[sP].[dR](C)[sP].[dR](T)[sP].[dR](C)[sP].[LR](T)[sP].[LR](T)[sP]. | | 79.6 | 69.7 |
| | | [dR](T)[sP].[dR](C)[sP].[LR]([5meC])[sP].[dR](A)[sP].[dR](A)[sP].[dR](A)[sP].[dR](T)[sP]. | | | |
| | | [dR](T)[sP].[dR](C)[sP].[LR](T)[sP].[LR]([5meC]) | | | |
| 2018 | 2018_2 | [LR](A)[sP].[LR](G)[sP].[dR](C)[sP].[dR](T)[sP].[dR](C)[sP].[LR](T)[sP].[dR](T)[sP]. | | 84.5 | 72.3 |
| | | [dR](T)[sP].[dR](C)[sP].[LR]([5meC])[sP].[dR](A)[sP].[dR](A)[sP].[dR](A)[sP].[dR](T)[sP]. | | | |
| | | [dR](T)[sP].[dR](C)[sP].[LR](T)[sP].[LR]([5meC]) | | | |
| 2018 | 2018_3 | [LR](A)[sP].[LR](G)[sP].[dR](C)[sP].[dR](T)[sP].[dR](C)[sP].[dR](T)[sP].[dR](T)[sP]. | | 80 | 63.7 |
| | | [dR](T)[sP].[dR](C)[sP].[LR]([5meC])[sP].[LR](A)[sP].[dR](A)[sP].[dR](A)[sP].[dR](T)[sP]. | | | |
| | | [dR](T)[sP].[dR](C)[sP].[LR](T)[sP].[LR]([5meC]) | | | |
| 2018 | 2018_4 | [LR](A)[sP].[LR](G)[sP].[dR](C)[sP].[dR](T)[sP].[LR]([5meC])[sP].[dR](T)[sP].[dR](T)[sP]. | | 83.5 | 77.2 |
| | | [dR](T)[sP].[dR](C)[sP].[LR]([5meC])[sP].[dR](A)[sP].[dR](A)[sP].[dR](A)[sP].[dR](T)[sP]. | | | |
| | | [dR](T)[sP].[dR](C)[sP].[LR](T)[sP].[LR]([5meC]) | | | |
| 2018 | 2018_5 | [LR](A)[sP].[LR](G)[sP].[dR](C)[sP].[dR](T)[sP].[dR](C)[sP].[dR](T)[sP].[dR](T)[sP]. | | 68.1 | 55.9 |
| | | [dR](T)[sP].[LR]([5meC])[sP].[dR](C)[sP].[LR](A)[sP].[dR](A)[sP].[dR](A)[sP].[dR](T)[sP]. | | | |
| | | [dR](T)[sP].[dR](C)[sP].[LR](T)[sP].[LR]([5meC]) | | | |
| 2019 | 2019_1 | [LR](T)[sP].[LR]([5meC])[sP].[LR](A)[sP].[LR](A)[sP].[dR](C)[sP].[dR](T)[sP].[LR](T)[sP]. | | 81.9 | 74.4 |
| | | [dR](C)[sP].[LR](T)[sP].[dR](A)[sP].[dR](C)[sP].[dR](T)[sP].[dR](A)[sP].[dR](C)[sP]. | | | |
| | | [dR](T)[sP].[LR](A)[sP].[LR](A)[sP].[LR](T)[sP].[LR](T) | | | |
| 2019 | 2019_2 | [LR](T)[sP].[LR]([5meC])[sP].[LR](A)[sP].[LR](A)[sP].[dR](C)[sP].[dR](T)[sP].[dR](T)[sP]. | | 31.1 | 49.7 |
| | | [LR]([5meC])[sP].[LR](T)[sP].[LR](A)[sP].[dR](C)[sP].[dR](T)[sP].[dR](A)[sP].[dR](C)[sP]. | | | |
| | | [dR](T)[sP].[dR](A)[sP].[dR](A)[sP].[LR](T)[sP].[LR](T) | | | |
| 2019 | 2019_3 | [LR](T)[sP].[LR]([5meC])[sP].[LR](A)[sP].[dR](A)[sP].[dR](C)[sP].[dR](T)[sP].[dR](T)[sP]. | | 80.1 | 73.1 |
| | | [dR](C)[sP].[dR](T)[sP].[dR](A)[sP].[LR]([5meC])[sP].[dR](T)[sP].[LR](A)[sP]. | | | |
| | | [LR]([5meC])[sP].[dR](T)[sP].[LR](A)[sP].[LR](A)[sP].[LR](T)[sP].[LR](T) | | | |
| 2019 | 2019_4 | [LR](T)[sP].[LR]([5meC])[sP].[dR](A)[sP].[dR](A)[sP].[LR]([5meC])[sP].[dR](T)[sP]. | | 66.6 | 70.8 |
| | | [dR](T)[sP].[dR](C)[sP].[dR](T)[sP].[dR](A)[sP].[dR](C)[sP].[dR](T)[sP].[LR](A)[sP]. | | | |
| | | [LR]([5meC])[sP].[dR](T)[sP].[dR](A)[sP].[LR](A)[sP].[LR](T)[sP].[LR](T) | | | |
| 2019 | 2019_5 | [LR](T)[sP].[LR]([5meC])[sP].[dR](A)[sP].[LR](A)[sP].[LR]([5meC])[sP].[LR](T)[sP]. | | 88.1 | 83.5 |
| | | [dR](T)[sP].[dR](C)[sP].[dR](T)[sP].[dR](A)[sP].[dR](C)[sP].[dR](T)[sP].[LR](A)[sP]. | | | |
| | | [dR](C)[sP].[LR](T)[sP].[dR](A)[sP].[dR](A)[sP].[LR](T)[sP].[LR](T) | | | |
| 2019 | 2019_6 | [LR](T)[sP].[LR]([5meC])[sP].[LR](A)[sP].[dR](A)[sP].[dR](C)[sP].[dR](T)[sP].[dR](T)[sP]. | | 59.7 | 63.7 |
| | | [dR](C)[sP].[dR](T)[sP].[dR](A)[sP].[dR](C)[sP].[LR](T)[sP].[dR](A)[sP].[LR]([5meC])[sP]. | | | |
| | | [LR](T)[sP].[dR](A)[sP].[LR](A)[sP].[LR](T)[sP].[LR](T) | | | |
| 2019 | 2019_7 | [LR](T)[sP].[LR]([5meC])[sP].[dR](A)[sP].[dR](A)[sP].[dR](C)[sP].[dR](T)[sP].[dR](T)[sP]. | | 88.7 | 86.1 |
| | | [dR](C)[sP].[LR](T)[sP].[dR](A)[sP].[dR](C)[sP].[LR](T)[sP].[dR](A)[sP].[LR]([5meC])[sP]. | | | |
| | | [dR](T)[sP].[dR](A)[sP].[LR](A)[sP].[LR](T)[sP].[LR](T) | | | |
| 2019 | 2019_8 | [LR](T)[sP].[LR]([5meC])[sP].[LR](A)[sP].[LR](A)[sP].[dR](C)[sP].[LR](T)[sP].[dR](T)[sP]. | | 71.2 | 68.5 |
| | | [dR](C)[sP].[dR](T)[sP].[dR](A)[sP].[dR](C)[sP].[dR](T)[sP].[dR](A)[sP].[LR]([5meC])[sP]. | | | |
| | | [dR](T)[sP].[LR](A)[sP].[LR](A)[sP].[LR](T)[sP].[LR](T) | | | |
| 2020 | 2020_1 | [LR]([5meC])[sP].[LR](A)[sP].[LR](A)[sP].[LR]([5meC])[sP].[dR](T)[sP].[dR](T)[sP]. | | 82.3 | 80.5 |
| | | [dR](C)[sP].[dR](T)[sP].[dR](A)[sP].[dR](C)[sP].[LR](T)[sP].[LR](A)[sP].[dR](C)[sP]. | | | |
| | | [LR](T)[sP].[dR](A)[sP].[dR](A)[sP].[LR](T)[sP].[LR](T) | | | |
| 2021 | 2021_1 | [LR](T)[sP].[LR]([5meC])[sP].[LR](A)[sP].[dR](A)[sP].[dR](C)[sP].[dR](T)[sP].[dR](T)[sP]. | | 80 | 80.5 |
| | | [dR](C)[sP].[dR](T)[sP].[dR](A)[sP].[LR]([5meC])[sP].[dR](T)[sP].[dR](A)[sP].[dR](C)[sP]. | | | |
| | | [LR](T)[sP].[LR](A)[sP].[LR](A)[sP].[LR](T) | | | |
| 2021 | 2021_2 | [LR](T)[sP].[LR]([5meC])[sP].[dR](A)[sP].[dR](A)[sP].[LR]([5meC])[sP].[LR](T)[sP]. | | 73.6 | 70.9 |
| | | [dR](T)[sP].[LR]([5meC])[sP].[dR](T)[sP].[dR](A)[sP].[dR](C)[sP].[dR](T)[sP].[dR](A)[sP]. | | | |
| | | [dR](C)[sP].[LR](T)[sP].[dR](A)[sP].[LR](A)[sP].[LR](T) | | | |
| 2021 | 2021_3 | [LR](T)[sP].[LR]([5meC])[sP].[dR](A)[sP].[dR](A)[sP].[dR](C)[sP].[dR](T)[sP].[dR](T)[sP]. | | 94.3 | 88.1 |
| | | [dR](C)[sP].[LR](T)[sP].[dR](A)[sP].[LR]([5meC])[sP].[LR](T)[sP].[dR](A)[sP].[dR](C)[sP]. | | | |
| | | [LR](T)[sP].[LR](A)[sP].[LR](A)[sP].[LR](T) | | | |
| 2021 | 2021_4 | [LR](T)[sP].[LR]([5meC])[sP].[LR](A)[sP].[dR](A)[sP].[LR]([5meC])[sP].[LR](T)[sP]. | | 87.3 | 88.1 |
| | | [dR](T)[sP].[dR](C)[sP].[dR](T)[sP].[dR](A)[sP].[dR](C)[sP].[dR](T)[sP].[LR](A)[sP]. | | | |
| | | [LR]([5meC])[sP].[dR](T)[sP].[LR](A)[sP].[LR](A)[sP].[LR](T) | | | |
| 2021 | 2021_5 | [LR](T)[sP].[LR]([5meC])[sP].[LR](A)[sP].[dR](A)[sP].[LR]([5meC])[sP].[dR](T)[sP]. | | 96.8 | 89.5 |
| | | [LR](T)[sP].[dR](C)[sP].[dR](T)[sP].[dR](A)[sP].[dR](C)[sP].[dR](T)[sP].[dR](A)[sP]. | | | |
| | | [LR]([5meC])[sP].[dR](T)[sP].[LR](A)[sP].[LR](A)[sP].[LR](T) | | | |
| 2022 | 2022_1 | [LR](A)[sP].[LR]([5meC])[sP].[dR](T)[sP].[dR](T)[sP].[dR](T)[sP].[dR](T)[sP].[LR](A)[sP]. | | 52.9 | 50.8 |
| | | [dR](C)[sP].[dR](A)[sP].[dR](T)[sP].[dR](T)[sP].[dR](C)[sP].[LR]([5meC])[sP].[dR](C)[sP]. | | | |
| | | [dR](A)[sP].[dR](T)[sP].[dR](T)[sP].[dR](A)[sP].[dR](A)[sP].[LR]([5meC])[sP].[LR](A) | | | |
| 2022 | 2022_2 | [LR](A)[sP].[LR]([5meC])[sP].[dR](T)[sP].[dR](T)[sP].[dR](T)[sP].[dR](T)[sP].[dR](A)[sP]. | | 24.5 | 31.4 |
| | | [dR](C)[sP].[LR](A)[sP].[dR](T)[sP].[LR](T)[sP].[dR](C)[sP].[dR](C)[sP].[dR](C)[sP]. | | | |
| | | [dR](A)[sP].[dR](T)[sP].[dR](T)[sP].[LR](A)[sP].[dR](A)[sP].[LR]([5meC])[sP].[LR](A) | | | |
| 2022 | 2022_3 | [LR](A)[sP].[LR]([5meC])[sP].[dR](T)[sP].[dR](T)[sP].[dR](T)[sP].[dR](T)[sP].[dR](A)[sP]. | 15.4 | 17.3 | 23.2 |
| | | [dR](C)[sP].[LR](A)[sP].[dR](T)[sP].[dR](T)[sP].[LR]([5meC])[sP].[dR](C)[sP].[dR](C)[sP]. | | | |
| | | [dR](A)[sP].[dR](T)[sP].[dR](T)[sP].[LR](A)[sP].[dR](A)[sP].[LR]([5meC])[sP].[LR](A) | | | |
| 2022 | 2022_4 | [LR](A)[sP].[LR]([5meC])[sP].[dR](T)[sP].[dR](T)[sP].[dR](T)[sP].[dR](T)[sP].[dR](A)[sP]. | | 35.5 | 43.5 |
| | | [dR](C)[sP].[LR](A)[sP].[dR](T)[sP].[dR](T)[sP].[dR](C)[sP].[LR]([5meC])[sP].[dR](C)[sP]. | | | |
| | | [dR](A)[sP].[dR](T)[sP].[dR](T)[sP].[dR](A)[sP].[dR](A)[sP].[LR]([5meC])[sP].[LR](A) | | | |
| 2022 | 2022_5 | [LR](A)[sP].[LR]([5meC])[sP].[dR](T)[sP].[dR](T)[sP].[dR](T)[sP].[dR](T)[sP].[dR](A)[sP]. | | 44.1 | 48.4 |
| | | [dR](C)[sP].[LR](A)[sP].[dR](T)[sP].[dR](T)[sP].[dR](C)[sP].[dR](C)[sP].[LR]([5meC])[sP]. | | | |
| | | [dR](A)[sP].[dR](T)[sP].[dR](T)[sP].[dR](A)[sP].[dR](A)[sP].[LR]([5meC])[sP].[LR](A) | | | |
| 2022 | 2022_6 | [LR](A)[sP].[LR]([5meC])[sP].[dR](T)[sP].[LR](T)[sP].[dR](T)[sP].[dR](T)[sP].[dR](A)[sP]. | | 45 | 49.5 |
| | | [dR](C)[sP].[dR](A)[sP].[dR](T)[sP].[dR](T)[sP].[dR](C)[sP].[LR]([5meC])[sP].[dR](C)[sP]. | | | |
| | | [dR](A)[sP].[dR](T)[sP].[dR](T)[sP].[dR](A)[sP].[dR](A)[sP].[LR]([5meC])[sP].[LR](A) | | | |
| 2022 | 2022_7 | [LR](A)[sP].[LR]([5meC])[sP].[dR](T)[sP].[dR](T)[sP].[dR](T)[sP].[dR](T)[sP].[dR](A)[sP]. | 76.8 | | 75.1 |
| | | [dR](C)[sP].[dR](A)[sP].[dR](T)[sP].[dR](T)[sP].[dR](C)[sP].[dR](C)[sP].[dR](C)[sP]. | | | |
| | | [dR](A)[sP].[dR](T)[sP].[dR](T)[sP].[dR](A)[sP].[dR](A)[sP].[LR]([5meC])[sP].[LR](A) | | | |
| 2022 | 2022_8 | [LR](A)[sP].[LR]([5meC])[sP].[dR](T)[sP].[dR](T)[sP].[dR](T)[sP].[dR](T)[sP].[dR](A)[sP]. | 58.5 | | 50.5 |
| | | [dR](C)[sP].[LR](A)[sP].[dR](T)[sP].[dR](T)[sP].[dR](C)[sP].[dR](C)[sP].[dR](C)[sP]. | | | |
| | | [dR](A)[sP].[dR](T)[sP].[dR](T)[sP].[dR](A)[sP].[dR](A)[sP].[LR]([5meC])[sP].[LR](A) | | | |
| 2022 | 2022_9 | [LR](A)[sP].[LR]([5meC])[sP].[dR](T)[sP].[dR](T)[sP].[dR](T)[sP].[dR](T)[sP].[dR](A)[sP]. | 52.8 | | 49.7 |
| | | [dR](C)[sP].[LR](A)[sP].[dR](T)[sP].[dR](T)[sP].[dR](C)[sP].[dR](C)[sP].[dR](C)[sP]. | | | |
| | | [LR](A)[sP].[dR](T)[sP].[dR](T)[sP].[dR](A)[sP].[dR](A)[sP].[LR]([5meC])[sP].[LR](A) | | | |
| 2022 | 2022_10 | [LR](A)[sP].[LR]([5meC])[sP].[dR](T)[sP].[dR](T)[sP].[dR](T)[sP].[dR](T)[sP].[dR](A)[sP]. | 54.7 | | 46.9 |
| | | [dR](C)[sP].[dR](A)[sP].[dR](T)[sP].[dR](T)[sP].[dR](C)[sP].[dR](C)[sP].[dR](C)[sP]. | | | |
| | | [dR](A)[sP].[dR](T)[sP].[dR](T)[sP].[LR](A)[sP].[dR](A)[sP].[LR]([5meC])[sP].[LR](A) | | | |
| 2022 | 2022_11 | [LR](A)[sP].[LR]([5meC])[sP].[dR](T)[sP].[dR](T)[sP].[dR](T)[sP].[dR](T)[sP].[dR](A)[sP]. | 36.1 | | 30.7 |
| | | [dR](C)[sP].[LR](A)[sP].[dR](T)[sP].[dR](T)[sP].[dR](C)[sP].[dR](C)[sP].[dR](C)[sP]. | | | |
| | | [dR](A)[sP].[dR](T)[sP].[dR](T)[sP].[LR](A)[sP].[dR](A)[sP].[LR]([5meC])[sP].[LR](A) | | | |
| 2022 | 2022_12 | [LR](A)[sP].[LR]([5meC])[sP].[dR](T)[sP].[dR](T)[sP].[dR](T)[sP].[dR](T)[sP].[dR](A)[sP]. | 40.5 | | 39.6 |
| | | [dR](C)[sP].[dR](A)[sP].[dR](T)[sP].[dR](T)[sP].[dR](C)[sP].[dR](C)[sP].[dR](C)[sP]. | | | |
| | | [LR](A)[sP].[dR](T)[sP].[dR](T)[sP].[LR](A)[sP].[dR](A)[sP].[LR]([5meC])[sP].[LR](A) | | | |
| 2022 | 2022_13 | [LR](A)[sP].[LR]([5meC])[sP].[dR](T)[sP].[dR](T)[sP].[dR](T)[sP].[dR](T)[sP].[LR](A)[sP]. | 37.8 | | 31.5 |
| | | [dR](C)[sP].[LR](A)[sP].[dR](T)[sP].[dR](T)[sP].[dR](C)[sP].[dR](C)[sP].[dR](C)[sP]. | | | |
| | | [dR](A)[sP].[dR](T)[sP].[dR](T)[sP].[dR](A)[sP].[dR](A)[sP].[LR]([5meC])[sP].[LR](A) | | | |
| 2022 | 2022_14 | [LR](A)[sP].[LR]([5meC])[sP].[dR](T)[sP].[dR](T)[sP].[dR](T)[sP].[dR](T)[sP].[dR](A)[sP]. | 29.7 | | 25.5 |
| | | [dR](C)[sP].[LR](A)[sP].[dR](T)[sP].[dR](T)[sP].[dR](C)[sP].[dR](C)[sP].[dR](C)[sP]. | | | |
| | | [LR](A)[sP].[dR](T)[sP].[dR](T)[sP].[LR](A)[sP].[dR](A)[sP].[LR]([5meC])[sP].[LR](A) | | | |
| 2022 | 2022_15 | [LR](A)[sP].[LR]([5meC])[sP].[dR](T)[sP].[LR](T)[sP].[dR](T)[sP].[dR](T)[sP].[dR](A)[sP]. | 35.4 | | 35.6 |
| | | [dR](C)[sP].[LR](A)[sP].[dR](T)[sP].[dR](T)[sP].[dR](C)[sP].[dR](C)[sP].[dR](C)[sP]. | | | |
| | | [dR](A)[sP].[dR](T)[sP].[dR](T)[sP].[dR](A)[sP].[dR](A)[sP].[LR]([5meC])[sP].[LR](A) | | | |
| 2022 | 2022_16 | [LR](A)[sP].[LR]([5meC])[sP].[dR](T)[sP].[dR](T)[sP].[LR](T)[sP].[dR](T)[sP].[dR](A)[sP]. | 49.1 | | 43 |
| | | [dR](C)[sP].[LR](A)[sP].[dR](T)[sP].[dR](T)[sP].[dR](C)[sP].[dR](C)[sP].[dR](C)[sP]. | | | |
| | | [dR](A)[sP].[dR](T)[sP].[dR](T)[sP].[dR](A)[sP].[dR](A)[sP].[LR]([5meC])[sP].[LR](A) | | | |
| 2022 | 2022_17 | [LR](A)[sP].[LR]([5meC])[sP].[dR](T)[sP].[dR](T)[sP].[dR](T)[sP].[dR](T)[sP].[dR](A)[sP]. | 39.9 | | 43.4 |
| | | [dR](C)[sP].[dR](A)[sP].[dR](T)[sP].[LR](T)[sP].[dR](C)[sP].[dR](C)[sP].[dR](C)[sP]. | | | |
| | | [dR](A)[sP].[dR](T)[sP].[dR](T)[sP].[dR](A)[sP].[dR](A)[sP].[LR]([5meC])[sP].[LR](A) | | | |
| 2022 | 2022_18 | [LR](A)[sP].[LR]([5meC])[sP].[dR](T)[sP].[dR](T)[sP].[dR](T)[sP].[dR](T)[sP].[LR](A)[sP]. | 35 | | 32.9 |
| | | [dR](C)[sP].[dR](A)[sP].[dR](T)[sP].[dR](T)[sP].[dR](C)[sP].[dR](C)[sP].[dR](C)[sP]. | | | |
| | | [dR](A)[sP].[dR](T)[sP].[dR](T)[sP].[LR](A)[sP].[dR](A)[sP].[LR]([5meC])[sP].[LR](A) | | | |
| 2022 | 2022_19 | [LR](A)[sP].[LR]([5meC])[sP].[dR](T)[sP].[dR](T)[sP].[dR](T)[sP].[dR](T)[sP].[LR](A)[sP]. | 25.2 | | 21.4 |
| | | [dR](C)[sP].[LR](A)[sP].[dR](T)[sP].[dR](T)[sP].[dR](C)[sP].[dR](C)[sP].[dR](C)[sP]. | | | |
| | | [dR](A)[sP].[dR](T)[sP].[dR](T)[sP].[LR](A)[sP].[dR](A)[sP].[LR]([5meC])[sP].[LR](A) | | | |
| 2022 | 2022_20 | [LR](A)[sP].[LR]([5meC])[sP].[dR](T)[sP].[dR](T)[sP].[dR](T)[sP].[dR](T)[sP].[dR](A)[sP]. | 62.2 | | 57.2 |
| | | [dR](C)[sP].[dR](A)[sP].[LR](T)[sP].[dR](T)[sP].[dR](C)[sP].[dR](C)[sP].[dR](C)[sP]. | | | |
| | | [dR](A)[sP].[dR](T)[sP].[dR](T)[sP].[dR](A)[sP].[dR](A)[sP].[LR]([5meC])[sP].[LR](A) | | | |
| 2022 | 2022_21 | [LR](A)[sP].[LR]([5meC])[sP].[dR](T)[sP].[dR](T)[sP].[dR](T)[sP].[dR](T)[sP].[dR](A)[sP]. | 26.5 | | 29.4 |
| | | [dR](C)[sP].[LR](A)[sP].[dR](T)[sP].[LR](T)[sP].[dR](C)[sP].[dR](C)[sP].[dR](C)[sP]. | | | |
| | | [dR](A)[sP].[dR](T)[sP].[dR](T)[sP].[dR](A)[sP].[dR](A)[sP].[LR]([5meC])[sP].[LR](A) | | | |
| 2022 | 2022_22 | [LR](A)[sP].[LR]([5meC])[sP].[dR](T)[sP].[dR](T)[sP].[dR](T)[sP].[dR](T)[sP].[dR](A)[sP]. | 36.3 | | 42.6 |
| | | [dR](C)[sP].[dR](A)[sP].[dR](T)[sP].[LR](T)[sP].[dR](C)[sP].[dR](C)[sP].[dR](C)[sP]. | | | |
| | | [LR](A)[sP].[dR](T)[sP].[dR](T)[sP].[dR](A)[sP].[dR](A)[sP].[LR]([5meC])[sP].[LR](A) | | | |
| 2022 | 2022_23 | [LR](A)[sP].[LR]([5meC])[sP].[dR](T)[sP].[dR](T)[sP].[dR](T)[sP].[dR](T)[sP].[dR](A)[sP]. | 23.6 | | 31 |
| | | [dR](C)[sP].[LR](A)[sP].[dR](T)[sP].[LR](T)[sP].[dR](C)[sP].[dR](C)[sP].[dR](C)[sP]. | | | |
| | | [LR](A)[sP].[dR](T)[sP].[dR](T)[sP].[dR](A)[sP].[dR](A)[sP].[LR]([5meC])[sP].[LR](A) | | | |
| 2022 | 2022_24 | [LR](A)[sP].[LR]([5meC])[sP].[dR](T)[sP].[LR](T)[sP].[dR](T)[sP].[dR](T)[sP].[dR](A)[sP]. | 50.6 | | 29.3 |
| | | [dR](C)[sP].[dR](A)[sP].[dR](T)[sP].[dR](T)[sP].[dR](C)[sP].[dR](C)[sP].[dR](C)[sP]. | | | |
| | | [dR](A)[sP].[dR](T)[sP].[dR](T)[sP].[LR](A)[sP].[dR](A)[sP].[LR]([5meC])[sP].[LR](A) | | | |
| 2022 | 2022_25 | [LR](A)[sP].[LR]([5meC])[sP].[dR](T)[sP].[dR](T)[sP].[LR](T)[sP].[dR](T)[sP].[dR](A)[sP]. | 37.3 | | 33.4 |
| | | [dR](C)[sP].[dR](A)[sP].[dR](T)[sP].[dR](T)[sP].[dR](C)[sP].[dR](C)[sP].[dR](C)[sP]. | | | |
| | | [dR](A)[sP].[dR](T)[sP].[dR](T)[sP].[LR](A)[sP].[dR](A)[sP].[LR]([5meC])[sP].[LR](A) | | | |
| 2022 | 2022_26 | [LR](A)[sP].[LR]([5meC])[sP].[dR](T)[sP].[LR](T)[sP].[dR](T)[sP].[dR](T)[sP].[dR](A)[sP]. | 29.6 | | 23.2 |
| | | [dR](C)[sP].[LR](A)[sP].[dR](T)[sP].[dR](T)[sP].[dR](C)[sP].[dR](C)[sP].[dR](C)[sP]. | | | |
| | | [dR](A)[sP].[dR](T)[sP].[dR](T)[sP].[LR](A)[sP].[dR](A)[sP].[LR]([5meC])[sP].[LR](A) | | | |
| 2022 | 2022_27 | [LR](A)[sP].[LR]([5meC])[sP].[dR](T)[sP].[dR](T)[sP].[LR](T)[sP].[dR](T)[sP].[dR](A)[sP]. | 34.8 | | 29.1 |
| | | [dR](C)[sP].[LR](A)[sP].[dR](T)[sP].[dR](T)[sP].[dR](C)[sP].[dR](C)[sP].[dR](C)[sP]. | | | |
| | | [dR](A)[sP].[dR](T)[sP].[dR](T)[sP].[LR](A)[sP].[dR](A)[sP].[LR]([5meC])[sP].[LR](A) | | | |
| 2022 | 2022_28 | [LR](A)[sP].[LR]([5meC])[sP].[dR](T)[sP].[dR](T)[sP].[dR](T)[sP].[dR](T)[sP].[dR](A)[sP]. | 50.7 | | 45.3 |
| | | [dR](C)[sP].[LR](A)[sP].[dR](T)[sP].[dR](T)[sP].[dR](C)[sP].[dR](C)[sP].[dR](C)[sP]. | | | |
| | | [dR](A)[sP].[LR](T)[sP].[dR](T)[sP].[dR](A)[sP].[dR](A)[sP].[LR]([5meC])[sP].[LR](A) | | | |
| 2022 | 2022_29 | [LR](A)[sP].[LR]([5meC])[sP].[dR](T)[sP].[dR](T)[sP].[dR](T)[sP].[dR](T)[sP].[dR](A)[sP]. | 38.9 | | 37.2 |
| | | [dR](C)[sP].[dR](A)[sP].[LR](T)[sP].[dR](T)[sP].[dR](C)[sP].[dR](C)[sP].[dR](C)[sP]. | | | |
| | | [dR](A)[sP].[dR](T)[sP].[dR](T)[sP].[LR](A)[sP].[dR](A)[sP].[LR]([5meC])[sP].[LR](A) | | | |
| 2022 | 2022_30 | [LR](A)[sP].[LR]([5meC])[sP].[dR](T)[sP].[dR](T)[sP].[dR](T)[sP].[dR](T)[sP].[dR](A)[sP]. | 21.2 | | 25.9 |
| | | [dR](C)[sP].[dR](A)[sP].[dR](T)[sP].[LR](T)[sP].[dR](C)[sP].[dR](C)[sP].[dR](C)[sP]. | | | |
| | | [dR](A)[sP].[dR](T)[sP].[dR](T)[sP].[LR](A)[sP].[dR](A)[sP].[LR]([5meC])[sP].[LR](A) | | | |
| 2022 | 2022_31 | [LR](A)[sP].[LR]([5meC])[sP].[dR](T)[sP].[dR](T)[sP].[dR](T)[sP].[dR](T)[sP].[dR](A)[sP]. | 19.9 | | 25 |
| | | [dR](C)[sP].[dR](A)[sP].[dR](T)[sP].[LR](T)[sP].[dR](C)[sP].[dR](C)[sP].[dR](C)[sP]. | | | |
| | | [LR](A)[sP].[dR](T)[sP].[dR](T)[sP].[LR](A)[sP].[dR](A)[sP].[LR]([5meC])[sP].[LR](A) | | | |
| 2022 | 2022_32 | [LR](A)[sP].[LR]([5meC])[sP].[dR](T)[sP].[dR](T)[sP].[dR](T)[sP].[dR](T)[sP].[dR](A)[sP]. | 36.9 | | 32 |
| | | [dR](C)[sP].[dR](A)[sP].[dR](T)[sP].[dR](T)[sP].[dR](C)[sP].[dR](C)[sP].[dR](C)[sP]. | | | |
| | | [dR](A)[sP].[LR](T)[sP].[dR](T)[sP].[LR](A)[sP].[dR](A)[sP].[LR]([5meC])[sP].[LR](A) | | | |
| 2022 | 2022_33 | [LR](A)[sP].[LR]([5meC])[sP].[dR](T)[sP].[dR](T)[sP].[dR](T)[sP].[dR](T)[sP].[LR](A)[sP]. | 44 | | 41.7 |
| | | [dR](C)[sP].[dR](A)[sP].[LR](T)[sP].[dR](T)[sP].[dR](C)[sP].[dR](C)[sP].[dR](C)[sP]. | | | |
| | | [dR](A)[sP].[dR](T)[sP].[dR](T)[sP].[dR](A)[sP].[dR](A)[sP].[LR]([5meC])[sP].[LR](A) | | | |
| 2022 | 2022_34 | [LR](A)[sP].[LR]([5meC])[sP].[dR](T)[sP].[dR](T)[sP].[dR](T)[sP].[dR](T)[sP].[dR](A)[sP]. | 53.6 | | 50 |
| | | [dR](C)[sP].[dR](A)[sP].[dR](T)[sP].[dR](T)[sP].[dR](C)[sP].[LR]([5meC])[sP].[dR](C)[sP]. | | | |
| | | [dR](A)[sP].[dR](T)[sP].[dR](T)[sP].[dR](A)[sP].[dR](A)[sP].[LR]([5meC])[sP].[LR](A) | | | |
| 2022 | 2022_35 | [LR](A)[sP].[LR]([5meC])[sP].[dR](T)[sP].[dR](T)[sP].[dR](T)[sP].[dR](T)[sP].[dR](A)[sP]. | 31.2 | | 34.5 |
| | | [dR](C)[sP].[dR](A)[sP].[LR](T)[sP].[dR](T)[sP].[dR](C)[sP].[dR](C)[sP].[dR](C)[sP]. | | | |
| | | [LR](A)[sP].[dR](T)[sP].[dR](T)[sP].[LR](A)[sP].[dR](A)[sP].[LR]([5meC])[sP].[LR](A) | | | |
| 2022 | 2022_36 | [LR](A)[sP].[LR]([5meC])[sP].[dR](T)[sP].[dR](T)[sP].[dR](T)[sP].[dR](T)[sP].[dR](A)[sP]. | 18.7 | | 20.2 |
| | | [dR](C)[sP].[LR](A)[sP].[dR](T)[sP].[LR](T)[sP].[dR](C)[sP].[dR](C)[sP].[dR](C)[sP]. | | | |
| | | [LR](A)[sP].[dR](T)[sP].[dR](T)[sP].[LR](A)[sP].[dR](A)[sP].[LR]([5meC])[sP].[LR](A) | | | |
| 2022 | 2022_37 | [LR](A)[sP].[LR]([5meC])[sP].[dR](T)[sP].[dR](T)[sP].[dR](T)[sP].[dR](T)[sP].[dR](A)[sP]. | 31.6 | | 26.1 |
| | | [dR](C)[sP].[LR](A)[sP].[dR](T)[sP].[dR](T)[sP].[dR](C)[sP].[dR](C)[sP].[dR](C)[sP]. | | | |
| | | [dR](A)[sP].[LR](T)[sP].[dR](T)[sP].[LR](A)[sP].[dR](A)[sP].[LR]([5meC])[sP].[LR](A) | | | |
| 2022 | 2022_38 | [LR](A)[sP].[LR]([5meC])[sP].[dR](T)[sP].[dR](T)[sP].[dR](T)[sP].[LR](T)[sP].[dR](A)[sP]. | 43.4 | | 37.5 |
| | | [dR](C)[sP].[LR](A)[sP].[dR](T)[sP].[dR](T)[sP].[dR](C)[sP].[dR](C)[sP].[dR](C)[sP]. | | | |
| | | [dR](A)[sP].[dR](T)[sP].[dR](T)[sP].[dR](A)[sP].[dR](A)[sP].[LR]([5meC])[sP].[LR](A) | | | |
| 2022 | 2022_39 | [LR](A)[sP].[LR]([5meC])[sP].[dR](T)[sP].[LR](T)[sP].[dR](T)[sP].[dR](T)[sP].[dR](A)[sP]. | 45.7 | | 43.6 |
| | | [dR](C)[sP].[dR](A)[sP].[LR](T)[sP].[dR](T)[sP].[dR](C)[sP].[dR](C)[sP].[dR](C)[sP]. | | | |
| | | [dR](A)[sP].[dR](T)[sP].[dR](T)[sP].[dR](A)[sP].[dR](A)[sP].[LR]([5meC])[sP].[LR](A) | | | |
| 2022 | 2022_40 | [LR](A)[sP].[LR]([5meC])[sP].[dR](T)[sP].[dR](T)[sP].[LR](T)[sP].[dR](T)[sP].[dR](A)[sP]. | 55.9 | | 50.8 |
| | | [dR](C)[sP].[dR](A)[sP].[LR](T)[sP].[dR](T)[sP].[dR](C)[sP].[dR](C)[sP].[dR](C)[sP]. | | | |
| | | [dR](A)[sP].[dR](T)[sP].[dR](T)[sP].[dR](A)[sP].[dR](A)[sP].[LR]([5meC])[sP].[LR](A) | | | |
| 2022 | 2022_41 | [LR](A)[sP].[LR]([5meC])[sP].[dR](T)[sP].[dR](T)[sP].[dR](T)[sP].[dR](T)[sP].[dR](A)[sP]. | 34.7 | | 39.4 |
| | | [dR](C)[sP].[dR](A)[sP].[dR](T)[sP].[dR](T)[sP].[LR]([5meC])[sP].[dR](C)[sP].[dR](C)[sP]. | | | |
| | | [dR](A)[sP].[dR](T)[sP].[dR](T)[sP].[dR](A)[sP].[dR](A)[sP].[LR]([5meC])[sP].[LR](A) | | | |
| 2022 | 2022_42 | [LR](A)[sP].[LR]([5meC])[sP].[dR](T)[sP].[dR](T)[sP].[dR](T)[sP].[dR](T)[sP].[dR](A)[sP]. | 65.3 | | 49.4 |
| | | [dR](C)[sP].[dR](A)[sP].[dR](T)[sP].[dR](T)[sP].[dR](C)[sP].[dR](C)[sP].[dR](C)[sP]. | | | |
| | | [dR](A)[sP].[dR](T)[sP].[LR](T)[sP].[dR](A)[sP].[dR](A)[sP].[LR]([5meC])[sP].[LR](A) | | | |
| 2022 | 2022_43 | [LR](A)[sP].[LR]([5meC])[sP].[dR](T)[sP].[dR](T)[sP].[dR](T)[sP].[dR](T)[sP].[dR](A)[sP]. | 41.7 | | 32.5 |
| | | [dR](C)[sP].[LR](A)[sP].[dR](T)[sP].[dR](T)[sP].[dR](C)[sP].[dR](C)[sP].[dR](C)[sP]. | | | |
| | | [dR](A)[sP].[dR](T)[sP].[LR](T)[sP].[dR](A)[sP].[dR](A)[sP].[LR]([5meC])[sP].[LR](A) | | | |
| 2022 | 2022_44 | [LR](A)[sP].[LR]([5meC])[sP].[dR](T)[sP].[dR](T)[sP].[dR](T)[sP].[dR](T)[sP].[dR](A)[sP]. | 31.7 | | 32.2 |
| | | [dR](C)[sP].[dR](A)[sP].[dR](T)[sP].[dR](T)[sP].[dR](C)[sP].[dR](C)[sP].[LR]([5meC])[sP]. | | | |
| | | [dR](A)[sP].[dR](T)[sP].[dR](T)[sP].[LR](A)[sP].[dR](A)[sP].[LR]([5meC])[sP].[LR](A) | | | |
| 2022 | 2022_45 | [LR](A)[sP].[LR]([5meC])[sP].[dR](T)[sP].[dR](T)[sP].[dR](T)[sP].[dR](T)[sP].[dR](A)[sP]. | ?2 | | 26.2 |
| | | [dR](C)[sP].[LR](A)[sP].[dR](T)[sP].[dR](T)[sP].[dR](C)[sP].[dR](C)[sP].[LR]([5meC])[sP]. | | | |
| | | [dR](A)[sP].[dR](T)[sP].[dR](T)[sP].[LR](A)[sP].[dR](A)[sP].[LR]([5meC])[sP].[LR](A) | | | |
| 2022 | 2022_46 | [LR](A)[sP].[LR]([5meC])[sP].[dR](T)[sP].[LR](T)[sP].[dR](T)[sP].[dR](T)[sP].[dR](A)[sP]. | 54.5 | | 44 |
| | | [dR](C)[sP].[dR](A)[sP].[dR](T)[sP].[dR](T)[sP].[dR](C)[sP].[dR](C)[sP].[dR](C)[sP]. | | | |
| | | [dR](A)[sP].[dR](T)[sP].[dR](T)[sP].[dR](A)[sP].[dR](A)[sP].[LR]([5meC])[sP].[LR](A) | | | |
| 2022 | 2022_47 | [LR](A)[sP].[LR]([5meC])[sP].[dR](T)[sP].[dR](T)[sP].[dR](T)[sP].[dR](T)[sP].[dR](A)[sP]. | 16.3 | | 25.8 |
| | | [dR](C)[sP].[LR](A)[sP].[dR](T)[sP].[mR](U)[sP].[LR]([5meC])[sP].[dR](C)[sP].[dR](C)[sP]. | | | |
| | | [dR](A)[sP].[dR](T)[sP].[dR](T)[sP].[LR](A)[sP].[dR](A)[sP].[LR]([5meC])[sP].[LR](A) | | | |
| 2022 | 2022_48 | [LR](A)[sP].[LR]([5meC])[sP].[dR](T)[sP].[dR](T)[sP].[dR](T)[sP].[dR](T)[sP].[dR](A)[sP]. | 30.2 | | 24 |
| | | [dR](C)[sP].[LR](A)[sP].[mR](U)[sP].[dR](T)[sP].[LR]([5meC])[sP].[dR](C)[sP].[dR](C)[sP]. | | | |
| | | [dR](A)[sP].[dR](T)[sP].[dR](T)[sP].[LR](A)[sP].[dR](A)[sP].[LR]([5meC])[sP].[LR](A) | | | |
| 2022 | 2022_49 | [LR](A)[sP].[LR]([5meC])[sP].[dR](T)[sP].[dR](T)[sP].[dR](T)[sP].[dR](T)[sP].[dR](A)[sP]. | 33.7 | | 40.5 |
| | | [dR](C)[sP].[LR](A)[sP].[dR](T)[sP].[mR](U)[sP].[dR](C)[sP].[dR](C)[sP].[dR](C)[sP]. | | | |
| | | [mR](A)[sP].[dR](T)[sP].[dR](T)[sP].[LR](A)[sP].[dR](A)[sP].[LR]([5meC])[sP].[LR](A) | | | |
| 2023 | 2023_1 | [LR](A)[sP].[LR]([5meC])[sP].[dR](A)[sP].[dR](C)[sP].[dR](T)[sP].[dR](T)[sP].[LR](T)[sP]. | | 45.9 | 45.9 |
| | | [dR](T)[sP].[dR](A)[sP].[dR](C)[sP].[dR](A)[sP].[dR](T)[sP].[dR](T)[sP].[LR]([5meC])[sP]. | | | |
| | | [dR](C)[sP].[dR](C)[sP].[dR](A)[sP].[dR](T)[sP].[dR](T)[sP].[LR](A)[sP].[LR](A) | | | |
| 2023 | 2023_2 | [LR](A)[sP].[LR]([5meC])[sP].[dR](A)[sP].[dR](C)[sP].[dR](T)[sP].[LR](T)[sP].[dR](T)[sP]. | | 45.9 | 44.6 |
| | | [dR](T)[sP].[dR](A)[sP].[dR](C)[sP].[dR](A)[sP].[LR](T)[sP].[LR](T)[sP].[dR](C)[sP]. | | | |
| | | [dR](C)[sP].[dR](C)[sP].[dR](A)[sP].[dR](T)[sP].[dR](T)[sP].[LR](A)[sP].[LR](A) | | | |
| 2023 | 2023_3 | [LR](A)[sP].[LR]([5meC])[sP].[LR](A)[sP].[dR](C)[sP].[LR](T)[sP].[dR](T)[sP].[dR](T)[sP]. | | 20.2 | 22.6 |
| | | [dR](T)[sP].[dR](A)[sP].[dR](C)[sP].[LR](A)[sP].[dR](T)[sP].[LR](T)[sP].[dR](C)[sP]. | | | |
| | | [dR](C)[sP].[dR](C)[sP].[dR](A)[sP].[dR](T)[sP].[dR](T)[sP].[LR](A)[sP].[LR](A) | | | |
| 2023 | 2023_4 | [LR](A)[sP].[LR]([5meC])[sP].[dR](A)[sP].[LR]([5meC])[sP].[dR](T)[sP].[dR](T)[sP]. | | 13.9 | 19.3 |
| | | [dR](T)[sP].[dR](T)[sP].[dR](A)[sP].[dR](C)[sP].[LR](A)[sP].[dR](T)[sP].[dR](T)[sP]. | | | |
| | | [LR]([5meC])[sP].[dR](C)[sP].[dR](C)[sP].[dR](A)[sP].[dR](T)[sP].[dR](T)[sP].[LR](A)[sP]. | | | |
| | | [LR](A) | | | |
| 2023 | 2023_5 | [LR](A)[sP].[LR]([5meC])[sP].[LR](A)[sP].[dR](C)[sP].[dR](T)[sP].[dR](T)[sP].[dR](T)[sP]. | | 17.4 | 25.8 |
| | | [dR](T)[sP].[dR](A)[sP].[LR]([5meC])[sP].[dR](A)[sP].[dR](T)[sP].[dR](T)[sP]. | | | |
| | | [LR]([5meC])[sP].[dR](C)[sP].[dR](C)[sP].[dR](A)[sP].[dR](T)[sP].[dR](T)[sP].[LR](A)[sP]. | | | |
| | | [LR](A) | | | |
| 2023 | 2023_6 | [LR](A)[sP].[LR]([5meC])[sP].[dR](A)[sP].[dR](C)[sP].[dR](T)[sP].[LR](T)[sP].[dR](T)[sP]. | | 56.7 | 51.9 |
| | | [dR](T)[sP].[dR](A)[sP].[dR](C)[sP].[dR](A)[sP].[dR](T)[sP].[dR](T)[sP].[dR](C)[sP]. | | | |
| | | [dR](C)[sP].[dR](C)[sP].[dR](A)[sP].[LR](T)[sP].[dR](T)[sP].[LR](A)[sP].[LR](A) | | | |
| 2023 | 2023_7 | [LR](A)[sP].[LR]([5meC])[sP].[dR](A)[sP].[dR](C)[sP].[dR](T)[sP].[dR](T)[sP].[dR](T)[sP]. | | 41.9 | 43.7 |
| | | [dR](T)[sP].[LR](A)[sP].[dR](C)[sP].[dR](A)[sP].[dR](T)[sP].[dR](T)[sP].[dR](C)[sP]. | | | |
| | | [LR]([5meC])[sP].[dR](C)[sP].[LR](A)[sP].[dR](T)[sP].[dR](T)[sP].[LR](A)[sP].[LR](A) | | | |
| 2023 | 2023_8 | [LR](A)[sP].[LR]([5meC])[sP].[dR](A)[sP].[dR](C)[sP].[LR](T)[sP].[dR](T)[sP].[dR](T)[sP]. | | 37.2 | 40 |
| | | [dR](T)[sP].[dR](A)[sP].[dR](C)[sP].[dR](A)[sP].[LR](T)[sP].[dR](T)[sP].[dR](C)[sP]. | | | |
| | | [dR](C)[sP].[LR]([5meC])[sP].[dR](A)[sP].[LR](T)[sP].[dR](T)[sP].[LR](A)[sP].[LR](A) | | | |
| 2023 | 2023_9 | [LR](A)[sP].[LR]([5meC])[sP].[dR](A)[sP].[dR](C)[sP].[dR](T)[sP].[LR](T)[sP].[dR](T)[sP]. | | 59.1 | 48.8 |
| | | [dR](T)[sP].[dR](A)[sP].[dR](C)[sP].[dR](A)[sP].[dR](T)[sP].[dR](T)[sP].[dR](C)[sP]. | | | |
| | | [dR](C)[sP].[dR](C)[sP].[LR](A)[sP].[dR](T)[sP].[dR](T)[sP].[LR](A)[sP].[LR](A) | | | |
| 2024 | 2024_1 | [LR](G)[sP].[LR](T)[sP].[LR](A)[sP].[LR](T)[sP].[dR](A)[sP].[LR]([5meC])[sP].[LR](A)[sP]. | | 102 | 97.6 |
| | | [LR](T)[sP].[LR](T)[sP].[dR](T)[sP].[dR](A)[sP].[dR](T)[sP].[dR](C)[sP].[dR](A)[sP]. | | | |
| | | [dR](A)[sP].[LR](A)[sP].[LR](A)[sP].[LR](A)[sP].[LR](A) | | | |
| 2025 | 2025_1 | [LR](A)[sP].[LR](A)[sP].[dR](T)[sP].[LR]([5meC])[sP].[LR](T)[sP].[LR](T)[sP].[LR](A)[sP]. | | 47 | 42.1 |
| | | [dR](T)[sP].[dR](T)[sP].[dR](T)[sP].[dR](A)[sP].[dR](C)[sP].[dR](A)[sP].[dR](T)[sP]. | | | |
| | | [dR](C)[sP].[LR](T)[sP].[LR](T)[sP].[LR]([5meC]) | | | |
| 2025 | 2025_2 | [LR](A)[sP].[LR](A)[sP].[LR](T)[sP].[dR](C)[sP].[LR](T)[sP].[LR](T)[sP].[LR](A)[sP]. | | 87.1 | 63.8 |
| | | [LR](T)[sP].[dR](T)[sP].[dR](T)[sP].[dR](A)[sP].[dR](C)[sP].[dR](A)[sP].[dR](T)[sP]. | | | |
| | | [dR](C)[sP].[LR](T)[sP].[LR](T)[sP].[LR]([5meC]) | | | |
| 2025 | 2025_3 | [LR](A)[sP].[LR](A)[sP].[LR](T)[sP].[dR](C)[sP].[dR](T)[sP].[dR](T)[sP].[dR](A)[sP]. | | 75.5 | 61.1 |
| | | [dR](T)[sP].[dR](T)[sP].[LR](T)[sP].[LR](A)[sP].[LR]([5meC])[sP].[LR](A)[sP].[dR](T)[sP]. | | | |
| | | [dR](C)[sP].[LR](T)[sP].[LR](T)[sP].[LR]([5meC]) | | | |
| 2026 | 2026_1 | [LR](G)[sP].[LR](A)[sP].[dR](A)[sP].[LR](T)[sP].[LR]([5meC])[sP].[dR](T)[sP].[dR](T)[sP]. | | 98.7 | 87.6 |
| | | [dR](A)[sP].[dR](T)[sP].[dR](T)[sP].[dR](T)[sP].[LR](A)[sP].[dR](C)[sP].[LR](A)[sP]. | | | |
| | | [LR](T)[sP].[LR]([5meC])[sP].[LR](T) | | | |
| 2027 | 2027_1 | [LR](T)[sP].[LR](G)[sP].[LR](A)[sP].[dR](A)[sP].[dR](T)[sP].[LR]([5meC])[sP].[LR](T)[sP]. | | 69.6 | 60.1 |
| | | [LR](T)[sP].[dR](A)[sP].[dR](T)[sP].[dR](T)[sP].[dR](T)[sP].[dR](A)[sP].[dR](C)[sP]. | | | |
| | | [LR](A)[sP].[LR](T)[sP].[LR]([5meC]) | | | |
| 2028 | 2028_1 | [LR](A)[sP].[LR](A)[sP].[LR](A)[sP].[dR](A)[sP].[LR](T)[sP].[LR](T)[sP].[LR](A)[sP]. | | 103 | 91.4 |
| | | [dR](C)[sP].[dR](T)[sP].[dR](T)[sP].[dR](C)[sP].[dR](T)[sP].[dR](T)[sP].[LR](T)[sP]. | | | |
| | | [LR](T)[sP].[LR](A)[sP].[dR](T)[sP].[dR](C)[sP].[LR](A)[sP].[LR](T) | | | |
| 2029 | 2029_1 | [LR]([5meC])[sP].[LR](A)[sP].[dR](A)[sP].[dR](A)[sP].[LR](A)[sP].[dR](T)[sP].[dR](T)[sP]. | | 56.8 | 53.2 |
| | | [dR](A)[sP].[dR](C)[sP].[dR](T)[sP].[dR](T)[sP].[LR]([5meC])[sP].[dR](T)[sP].[dR](T)[sP]. | | | |
| | | [LR](T)[sP].[LR](T)[sP].[dR](A)[sP].[dR](T)[sP].[LR]([5meC])[sP].[LR](A) | | | |
| 2029 | 2029_2 | [LR]([5meC])[sP].[LR](A)[sP].[dR](A)[sP].[dR](A)[sP].[LR](A)[sP].[LR](T)[sP].[LR](T)[sP]. | | 92.3 | 83 |
| | | [dR](A)[sP].[dR](C)[sP].[dR](T)[sP].[dR](T)[sP].[dR](C)[sP].[dR](T)[sP].[LR](T)[sP]. | | | |
| | | [dR](T)[sP].[dR](T)[sP].[dR](A)[sP].[dR](T)[sP].[LR]([5meC])[sP].[LR](A) | | | |
| 2029 | 2029_3 | [LR]([5meC])[sP].[LR](A)[sP].[LR](A)[sP].[LR](A)[sP].[dR](A)[sP].[dR](T)[sP].[LR](T)[sP]. | | 102 | 97.9 |
| | | [dR](A)[sP].[dR](C)[sP].[dR](T)[sP].[dR](T)[sP].[dR](C)[sP].[dR](T)[sP].[LR](T)[sP]. | | | |
| | | [LR](T)[sP].[dR](T)[sP].[LR](A)[sP].[dR](T)[sP].[LR]([5meC])[sP].[LR](A) | | | |
| 2030 | 2030_1 | [LR](A)[sP].[LR](A)[sP].[LR](A)[sP].[LR](A)[sP].[dR](T)[sP].[dR](T)[sP].[LR](A)[sP]. | | 88.2 | 81.5 |
| | | [LR]([5meC])[sP].[LR](T)[sP].[dR](T)[sP].[dR](C)[sP].[dR](T)[sP].[dR](T)[sP].[dR](T)[sP]. | | | |
| | | [dR](T)[sP].[LR](A)[sP].[LR](T)[sP].[LR]([5meC])[sP].[LR](A) | | | |
| 2031 | 2031_1 | [LR](A)[sP].[LR](T)[sP].[dR](A)[sP].[dR](T)[sP].[dR](T)[sP].[dR](T)[sP].[dR](T)[sP]. | | 68 | 52.6 |
| | | [dR](A)[sP].[dR](C)[sP].[LR](T)[sP].[LR]([5meC])[sP].[dR](T)[sP].[dR](T)[sP].[LR](T)[sP]. | | | |
| | | [dR](T)[sP].[LR](T)[sP].[LR](A)[sP].[LR](T)[sP].[LR](T) | | | |
| 2031 | 2031_2 | [LR](A)[sP].[LR](T)[sP].[dR](A)[sP].[LR](T)[sP].[dR](T)[sP].[dR](T)[sP].[dR](T)[sP]. | | 93.3 | 78.9 |
| | | [dR](A)[sP].[dR](C)[sP].[dR](T)[sP].[LR]([5meC])[sP].[LR](T)[sP].[LR](T)[sP].[dR](T)[sP]. | | | |
| | | [LR](T)[sP].[dR](T)[sP].[LR](A)[sP].[LR](T)[sP].[LR](T) | | | |
| 2032 | 2032_1 | [LR](G)[sP].[LR](A)[sP].[dR](A)[sP].[dR](C)[sP].[LR]([5meC])[sP].[dR](A)[sP].[LR](T)[sP]. | | 26 | 44.2 |
| | | [LR](T)[sP].[dR](A)[sP].[dR](C)[sP].[dR](T)[sP].[dR](A)[sP].[dR](T)[sP].[dR](T)[sP]. | | | |
| | | [dR](A)[sP].[dR](T)[sP].[LR]([5meC])[sP].[LR](A) | | | |
| 2032 | 2032_2 | [LR](G)[sP].[LR](A)[sP].[dR](A)[sP].[LR]([5meC])[sP].[dR](C)[sP].[LR](A)[sP].[dR](T)[sP]. | | 27.8 | 46.9 |
| | | [dR](T)[sP].[dR](A)[sP].[dR](C)[sP].[dR](T)[sP].[dR](A)[sP].[dR](T)[sP].[LR](T)[sP]. | | | |
| | | [LR](A)[sP].[dR](T)[sP].[LR]([5meC])[sP].[LR](A) | | | |
| 2032 | 2032_3 | [LR](G)[sP].[LR](A)[sP].[dR](A)[sP].[dR](C)[sP].[LR]([5meC])[sP].[dR](A)[sP].[dR](T)[sP]. | | 23.1 | 43 |
| | | [dR](T)[sP].[dR](A)[sP].[dR](C)[sP].[dR](T)[sP].[dR](A)[sP].[dR](T)[sP].[LR](T)[sP]. | | | |
| | | [LR](A)[sP].[dR](T)[sP].[LR]([5meC])[sP].[LR](A) | | | |
| 2032 | 2032_4 | [LR](G)[sP].[LR](A)[sP].[dR](A)[sP].[dR](C)[sP].[dR](C)[sP].[dR](A)[sP].[dR](T)[sP]. | | 53.2 | 62.6 |
| | | [dR](T)[sP].[LR](A)[sP].[dR](C)[sP].[LR](T)[sP].[dR](A)[sP].[LR](T)[sP].[dR](T)[sP]. | | | |
| | | [dR](A)[sP].[LR](T)[sP].[LR]([5meC])[sP].[LR](A) | | | |
| 2032 | 2032_5 | [LR](G)[sP].[LR](A)[sP].[dR](A)[sP].[LR]([5meC])[sP].[LR]([5meC])[sP].[dR](A)[sP]. | | 36.3 | 63.7 |
| | | [dR](T)[sP].[dR](T)[sP].[dR](A)[sP].[dR](C)[sP].[dR](T)[sP].[dR](A)[sP].[dR](T)[sP]. | | | |
| | | [dR](T)[sP].[dR](A)[sP].[LR](T)[sP].[LR]([5meC])[sP].[LR](A) | | | |
| 2033 | 2033_1 | [LR](G)[sP].[LR](A)[sP].[dR](A)[sP].[LR]([5meC])[sP].[LR]([5meC])[sP].[LR](A)[sP]. | | 70.9 | 81.4 |
| | | [dR](T)[sP].[LR](T)[sP].[dR](A)[sP].[dR](C)[sP].[dR](T)[sP].[dR](A)[sP].[dR](T)[sP]. | | | |
| | | [dR](T)[sP].[dR](A)[sP].[LR](T)[sP].[LR]([5meC]) | | | |
| 2033 | 2033_2 | [LR](G)[sP].[LR](A)[sP].[dR](A)[sP].[LR]([5meC])[sP].[LR]([5meC])[sP].[LR](A)[sP]. | | 78.1 | 79.9 |
| | | [dR](T)[sP].[dR](T)[sP].[dR](A)[sP].[dR](C)[sP].[dR](T)[sP].[dR](A)[sP].[LR](T)[sP]. | | | |
| | | [dR](T)[sP].[LR](A)[sP].[LR](T)[sP].[LR]([5meC]) | | | |
| 2033 | 2033_3 | [LR](G)[sP].[LR](A)[sP].[LR](A)[sP].[LR]([5meC])[sP].[dR](C)[sP].[dR](A)[sP].[dR](T)[sP]. | | 81.8 | 74.4 |
| | | [dR](T)[sP].[dR](A)[sP].[dR](C)[sP].[LR](T)[sP].[LR](A)[sP].[dR](T)[sP].[dR](T)[sP]. | | | |
| | | [LR](A)[sP].[LR](T)[sP].[LR]([5meC]) | | | |
| 2034 | 2034_1 | [LR](T)[sP].[LR](A)[sP].[LR](G)[sP].[LR](A)[sP].[dR](A)[sP].[LR]([5meC])[sP].[dR](C)[sP]. | | 82 | 93.6 |
| | | [LR](A)[sP].[LR](T)[sP].[dR](T)[sP].[dR](A)[sP].[dR](C)[sP].[dR](T)[sP].[dR](A)[sP]. | | | |
| | | [dR](T)[sP].[dR](T)[sP].[LR](A)[sP].[LR](T) | | | |
| 2034 | 2034_2 | [LR](T)[sP].[LR](A)[sP].[dR](G)[sP].[LR](A)[sP].[dR](A)[sP].[dR](C)[sP].[dR](C)[sP]. | | 82 | 82.4 |
| | | [dR](A)[sP].[dR](T)[sP].[dR](T)[sP].[LR](A)[sP].[dR](C)[sP].[LR](T)[sP].[dR](A)[sP]. | | | |
| | | [LR](T)[sP].[LR](T)[sP].[LR](A)[sP].[LR](T) | | | |
| 2035 | 2035_1 | [LR](A)[sP].[LR](G)[sP].[LR](A)[sP].[dR](A)[sP].[dR](C)[sP].[dR](C)[sP].[dR](A)[sP]. | | 79.1 | 76.7 |
| | | [dR](T)[sP].[dR](T)[sP].[LR](A)[sP].[dR](C)[sP].[LR](T)[sP].[dR](A)[sP].[LR](T)[sP]. | | | |
| | | [LR](T)[sP].[LR](A)[sP].[LR](T) | | | |
| 2036 | 2036_1 | [LR](A)[sP].[LR](T)[sP].[LR]([5meC])[sP].[dR](A)[sP].[dR](A)[sP].[dR](A)[sP].[dR](A)[sP]. | | 92.7 | 96.1 |
| | | [dR](A)[sP].[dR](A)[sP].[LR]([5meC])[sP].[LR](T)[sP].[LR](T)[sP].[dR](T)[sP]. | | | |
| | | [LR]([5meC])[sP].[dR](C)[sP].[LR]([5meC])[sP].[LR](T) | | | |
| 2037 | 2037_1 | [LR](A)[sP].[LR](G)[sP].[LR](A)[sP].[dR](T)[sP].[LR]([5meC])[sP].[LR](A)[sP].[LR](A)[sP]. | | 101 | 91.6 |
| | | [LR](A)[sP].[dR](A)[sP].[dR](A)[sP].[dR](A)[sP].[dR](C)[sP].[dR](T)[sP].[dR](T)[sP]. | | | |
| | | [LR](T)[sP].[LR]([5meC])[sP].[LR]([5meC]) | | | |
| 2038 | 2038_1 | [LR](T)[sP].[LR](A)[sP].[LR](G)[sP].[LR](A)[sP].[dR](T)[sP].[dR](C)[sP].[dR](A)[sP]. | | 88.7 | 87.7 |
| | | [dR](A)[sP].[dR](A)[sP].[dR](A)[sP].[dR](A)[sP].[LR](A)[sP].[LR]([5meC])[sP].[LR](T)[sP]. | | | |
| | | [dR](T)[sP].[dR](T)[sP].[LR]([5meC])[sP].[LR]([5meC]) | | | |
| 2038 | 2038_2 | [LR](T)[sP].[LR](A)[sP].[LR](G)[sP].[LR](A)[sP].[dR](T)[sP].[dR](C)[sP].[dR](A)[sP]. | | 93.4 | 81.2 |
| | | [LR](A)[sP].[dR](A)[sP].[dR](A)[sP].[dR](A)[sP].[dR](A)[sP].[dR](C)[sP].[dR](T)[sP]. | | | |
| | | [dR](T)[sP].[LR](T)[sP].[LR]([5meC])[sP].[LR]([5meC]) | | | |
| 2038 | 2038_3 | [LR](T)[sP].[LR](A)[sP].[LR](G)[sP].[LR](A)[sP].[dR](T)[sP].[dR](C)[sP].[dR](A)[sP]. | | 83.5 | 84.3 |
| | | [dR](A)[sP].[dR](A)[sP].[dR](A)[sP].[dR](A)[sP].[dR](A)[sP].[LR]([5meC])[sP].[dR](T)[sP]. | | | |
| | | [LR](T)[sP].[dR](T)[sP].[LR]([5meC])[sP].[LR]([5meC]) | | | |
| 2039 | 2039_1 | [LR](A)[sP].[LR](T)[sP].[LR]([5meC])[sP].[LR]([5meC])[sP].[dR](T)[sP].[LR](A)[sP]. | | 104 | 94.7 |
| | | [LR](G)[sP].[LR](A)[sP].[dR](T)[sP].[dR](C)[sP].[dR](A)[sP].[dR](A)[sP].[dR](A)[sP]. | | | |
| | | [dR](A)[sP].[dR](A)[sP].[LR](A)[sP].[LR]([5meC]) | | | |

TABLE 15
Results from in vivo evaluation (Example 15)

| | Cortex | | Midbrain | | Cerebellum | | Pons/medulla | |
|---|---|---|---|---|---|---|---|---|
| | | Max | | Max | | Max | | Max |
| | EC50 | efficacy (% | EC50 | efficacy (% | EC50 | efficacy (% | EC50 | efficacy (% |
| CMP ID | (nM) | remaining) | (nM) | remaining) | (nM) | remaining) | (nM) | remaining) |
| 1122_67 * | 93.7 | 24 | 76.62 | 13 | 321.2 | 14 | 54.6 | 12 |
| | (91.6-96.0) | | (90.0-69.7) | | (307.1-332.3) | | (39.97-65.1) | |
| 1122_33 * | 62.9 | 60.7 | 80.6 | 25.3 | 305.1 | 13 | 34.0 | 13.1 |
| | (73.21-60.2) | | (74.96-82.2) | | (360.7-274.6) | | (18.15-42.3) | |
| 1605_23 | 201.9 | 41 | 167.4 | 10 | 867.3 | 15 | 153.9 | 9 |
| 1605_2 * | 55.4 | 24 | 40.8 | 11.9 | 296.9 | 35.3 | 38.7 | 11.2 |
| | (67.4-53.3) | | (72.71-28.6) | | (293.4-302.0) | | (65.98-24.5) | |
| 1810_39 | 145.8 | 37 | 114.6 | 12 | 485.9 | 30 | 252.9 | 16 |
| 1809_8 | 174.9 | 18 | 162.7 | 8 | 740.3 | 12 | 121.5 | 8 |
| 1605_3 | 90.14 | 43.3 | 57.12 | 25.5 | 174 | 46.3 | 52.66 | 21.8 |
| 1605_4 | 52.59 | 23.6 | 31.33 | 12.1 | 161.9 | 22 | 26.11 | 8 |
| 1813_4 | 166.5 | 19.7 | 103.3 | 21 | 405.9 | 27 | 90.99 | 13.1 |
| 1813_15 | 266.4 | 20.2 | 172.8 | 9.6 | 555.5 | 8.1 | 136.8 | 8.1 |
| 1605_5 | 24.6 | 32.2 | 15.6 | 14.1 | 131.6 | 30.2 | 12.2 | 9.4 |
| 1812_4 | 269.5 | 71.6 | 124.7 | 46.6 | 623.8 | 66 | 89.4 | 33.9 |
| 1813_16 | 255.4 | 39 | 158.0 | 22.3 | 1000.0 | 14.9 | 138.1 | 11.9 |

* Data from two individual in vivo experiments with identical setup. EC50 value is determined using data from both experiments. Max efficacy indicate overall highest level of knockdown across both experiments. Parenthesis indicate EC50 value from each individual experiment

### Example 17: Comparative Transgenic Mouse Study—Evaluation of Tolerability

### Materials and Methods:

[0429] These specified compounds referred to in the following Examples have the structures defined as follows (HELM notations):

| CMPIDNO | HELM |
|---|---|
| 1122_91 | [LR](A)[sP].[dR](A)[sP].[dR](T)[sP].[LR]([5meC])[sP].[dR](T)[sP].[LR](T)[sP]. |
| | [dR](A)[sP].[dR](T)[sP].[dR](T)[sP].[mR](U)[sP].[dR](A)[sP].[dR](C)[sP]. |
| | [dR](A)[sP].[dR](T)[sP].[dR](C)[sP].[dR](T)[sP].[LR](T)[sP].[LR]([5meC])[sP]. |
| | [LR]([5meC]) |
| 1122_154 | [LR](A)[sP].[dR](A)[sP].[dR](T)[sP].[LR]([5meC])[sP].[dR](T)[sP].[LR](T)[sP]. |
| | [dR](A)[sP].[dR](T)[sP].[dR](T)[sP].[dR](T)[sP].[dR](A)[ssP].[dR](C)[sP]. |
| | [dR](A)[sP].[dR](T)[sP].[dR](C)[sP].[dR](T)[sP].[LR](T)[sP].[LR]([5meC])[sP]. |
| | [LR]([5meC]) |
| 1122_172 | [LR](A)[sP].[dR](A)[sP].[dR](T)[sP].[LR]([5meC])[sP].[dR](T)[sP].[LR](T)[sP]. |
| | [dR](A)[sP].[dR](T)[sP].[dR](T)[sP].[dR](T)[sP].[dR](A)[sP].[dR](C)[sP]. |
| | [dR](A)[sP].[dR](T)[sP].[mR](C)[sP].[dR](T)[sP].[LR](T)[sP].[LR]([5meC])[sP]. |
| | [LR]([5meC]) |
| 1816_28 | [LR](G)[sP].[LR](A)[sP].[dR](A)[sP].[dR](T)[sP].[LR]([5meC])[sP].[dR](T)[sP]. |
| | [LR](T)[sP].[fR](A)[sP].[dR](T)[sP].[dR](T)[sP].[dR](T)[sP].[dR](A)[sP]. |
| | [dR](C)[sP].[dR](A)[sP].[dR](T)[sP].[LR]([5meC])[sP].[LR](T)[sP].[LR](T) |
| 1816_42 | [LR](G)[sP].[LR](A)[sP].[dR](A)[sP].[dR](T)[sP].[LR]([5meC])[sP].[dR](T)[sP]. |
| | [LR](T)[sP].[LR](A)[sP].[dR](T)[sP].[dR](T)[sP].[dR](T)[sP].[dR](A)[sP]. |
| | [dR](C)[sP].[dR](A)[sP].[dR](T)[sP].[LR]([5meC])[sP].[MOE](T)[sP].[LR](T) |
| 1816_43 | [LR](G)[sP].[LR](A)[sP].[dR](A)[sP].[dR](T)[sP].[LR]([5meC])[sP].[dR](T)[sP]. |
| | [LR](T)[sP].[LR](A)[sP].[dR](T)[sP].[dR](T)[sP].[dR](T)[sP].[dR](A)[sP]. |
| | [dR](C)[sP].[dR](A)[sP].[dR](T)[sP].[MOE]([5meC])[sP].[LR](T)[sP].[LR](T) |
| 1816_64 | [LR](G)[sP].[LR](A)[sP].[dR](A)[sP].[dR](T)[sP].[LR]([5meC])[sP].[dR](T)[sP]. |
| | [LR](T)[sP].[LR](A)[sP].[dR](T)[sP].[dR](T)[sP].[dR](T)[sP].[dR](A)[sP]. |
| | [dR](C)[sP].[dR](A)[sP].[dR](T)[sP].[fR](C)[sP].[LR](T)[sP].[LR](T) |
| 1816_65 | [LR](G)[sP].[LR](A)[sP].[dR](A)[sP].[dR](T)[sP].[LR]([5meC])[sP].[dR](T)[sP]. |
| | [LR](T)[sP].[LR](A)[sP].[dR](T)[sP].[dR](T)[sP].[dR](T)[sP].[dR](A)[sP]. |
| | [dR](C)[sP].[dR](A)[sP].[dR](T)[sP].[mR](C)[sP].[LR](T)[sP].[LR](T) |

[0430] A further in vivo study was conducted to evaluate tolerability of test compounds. The study was largely performed as described in Example 10. In short, wild type animals (C₅₇BL/6J) of around 7 weeks were included in the study. Animals, all female, arrived from The Jackson Laboratory, Bar Harbor, Me., USA were used. The mice were injected with the compounds via intracisternal (ICM) administration. After a period of 4 weeks, animals were euthanized and selected tissues were collected. The animals were injected with a dose 300 μg compound in WT animals.

[0431] Functional Observation Battery (FOB) scores from the animals were obtained On Day 1 at 1, 4, and 24+2 hours post dosing, then again prior to scheduled termination.

### The FOB (Functional Observation Battery) Score

[0432] The FOB score is a non-invasive tool describing various neurobehavioral and activity related parameters.

### Procedure:

[0433] Technicians were blinded to group belongings. Animals were observed for at least 1 minute in their home cage to record scores of the below mentioned parameters. Body temperature was recorded using a rectal thermometer.

[0434] The evaluation, except body temperature, was performed while the animal remained in its home cage; the open-field testing box will not be used.

| | | |
|---|---|---|
| Activity: | Excitability: | Autonomic: |
| Arousal/Alertness | Convulsions | Palpebral |
| Stereotypy | | Closure/Ptosis |
| Posture/Body Carriage | | Erected Fur |
| Neuromuscular: | Physiological: | |
| Gait/Mobility | Respiration | |
| Tremor | Body Temperature | |

[0435] Based on the evaluation of the animals they were scored as being either mild (in same range as saline control group), moderate or severely impacted by the administration of compound.

### Administration of Compound

[0436] Dose Route: Stereotaxic intracerebroventricular (ICV) injection. Dose volume was 10 μl. The dose was administered using a 10 μL Hamilton syringe with attached 22 gauge needle over one injection at a target of 1 μL/sec.

### Results:

[0437] The list of compounds is provided in Table 18 listing the compound ID number, the injected amount of test compound and a rating (mild, moderate or severe) of the in life observations, with mild meaning no or only few signs of adverse events, and severe meaning severe observation in the group with potential of premature takedown of animals in the group.

TABLE 18
Tolerability results.

| | | In life tolerability | No of | Premature |
|---|---|---|---|---|
| Compound ID | Dose | observations | animals* | termination |
| Saline | — | Mild | 6 | 0 |
| 1122_91 | 300 μg | Moderate | 7 | 0 |
| 1122_107 | 300 μg | Moderate | 7 | 0 |
| 1122_172 | 300 μg | Moderate | 7 | 0 |
| 1816_28 | 300 μg | Severe | 3 | 1 |
| 1816_42 | 300 μg | Severe | 3 | 0 |
| 1816_43 | 300 μg | Severe | 3 | 1 |
| 1122_154 | 300 μg | Moderate | 6 | 0 |
| 1122_156 | 300 μg | Mild | 6 | 0 |
| 1813_15 | 300 μg | Severe | 3 | 1 |
| 1605_4 | 300 μg | Mild | 6 | 0 |
| 1816_65 | 300 μg | Severe | 3 | 1 |
| 1605_2 | 300 μg | Mild | 6 | 0 |
| 1816_64 | 300 μg | Severe | 3 | 3 |

*For humane reasons 3 animals were dosed and depending on tolerability additional 3-4 animals were dosed on the following day.

[0438] From Table 18, different outcomes relating to acute tolerability were observed for the different compounds, with some compounds showing “mild” signs (like the saline group animals) including compound ID NOs 1122_156, 1605_4 and 1605_2, some compounds showing “moderate” signs like compound ID NOs 1122_107 and 1816_64, and other compounds again showing “severe” signs like compound ID NOs 1816_43 and 1816_64.

[0439] A histopathological evaluation (macroscopic and microscopic) of the mice was conducted following termination of the animals. The aim of the evaluation was to identify compound related toxicological events, both of subacute and late onset nature. The evaluation included the pathologist's assessment of possible compound related neuronal changes based and hematoxylin and eosin stains and by Fluoro-Jade stain to assess signs of neuronal degeneration.

### Example 18: In Vitro Duration of Action Evaluation of LNA Oligonucleotides in a Time Course, Dose Range Experiment in Human iPSC-Derived Neurons

### Materials and Methods:

[0440] The compounds listed in Table 19 and Table 20 were submitted to an in vitro evaluation of potency and efficacy in a time-course experimental setup. The study was largely performed as described in Example 9, with different time points and compounds.

[0441] The iCell® GlutaNeuron cells were prepared and maintained essentially as described in Example 5 & Table 2. 96-well cell culture plates were coated with Poly-L-Ornithine (0.01%) (Sigma-P4957), 100 μl/well for 4 hours, rinsed 3 times with PBS and coated with Laminin (Roche Diagnostic, 11243217001) 0.5 mg/ml diluted 1:500 in PBS overnight at 4 degrees Celsius. The cells were treated and maintained as per recommendation by the vendor using the provided protocol: iCell® GlutaNeurons, User's Guide, Document ID: X1005, Version 1.2, Cellular Dynamics, Fujifilm; available at https address cdn.stemcell.com/media/files/manual/MADX1005-icell_glutaneurons_users_guide.pdf (accessed on e.g. 10 Nov. 2020). Cells were grown for 7 days before addition of the oligonucleotide. Compounds were added to the cells from pre-dilution plates (compound diluted in PBS) to reach the desired final concentration. The concentrations used were an 8-step halflog with the following concentrations (nM): 31.6; 10; 3.2; 1; 0.32; 0.1; 0.03; 0.01.

[0442] Compounds used are listed in Table 19 and Table 20.

[0443] The following primers were used to assess the level of knockdown of the target mRNA of hATXN3.

Human ATXN3 pre-mRNA using the qPCR assay: custom design “(ATXN3_exon_8-9(1)”, PrimeTime® XL qPCR Assay (IDT).

Probe:
(SEQ ID NO: 1134)
5′-/56-FAM/CTCCGCAGG/ZEN/GCT ATTCAGCT AAGT /
31ABkFQ/-3′
Primer 1:
(SEQ ID NO: 1135)
5′-AGT AAGATTTGT ACCTGATGTCTGT-3′
Primer 2:
(SEQ ID NO: 1136)
5′-CATGGAAGATGAGGAAGCAGAT-3′

Human TBP pre-mRNA using the qPCR assay: “Hs.PT.58v. 39858774”, PrimeTime® XL qPCR Assay (IDT)

Probe:
(SEQ ID NO: 1131)
5′- /5HEX/TGA TCT TTG /ZEN/CAG TGA CCC AGC ATC A/
3IABkFQ/ -3′
Primer 1:
(SEQ ID NO: 1132)
5′- GCT GTT TAA CTT CGC TTC CG-3′
Primer 2:
(SEQ ID NO: 1133)
5′- CAG CAA CTT CCT CAA TTC CTT G-3′

[0444] Cells were harvested at 4 days, 20 days, 29 days, and 40 days after oligo treatment, and RNA extraction and qPCR was performed as described for Example 1, using the ATXN3 primer assay described in Example 5. The relative ATXN3 mRNA expression levels were determined as % of control (medium-treated cells), i.e. the lower the value the larger the inhibition.

### Results:

[0445] The results are shown in Table 19 and Table 20. Table 19 presents the potency of the tested compounds (EC50 value (nM)) over the indicated time points post dosing. Table 20 presents the data as percent remaining ATXN3 mRNA relative to PBS treated cells after dosing with 3.2 μM compound for the indicated time points post dosing.

TABLE 19
EC50 in hiPSC-derived neurons

EC50 in hiPSC-derived neurons, nM

| CMP ID | Day 4 | Day 20 | Day 29 | Day 40 |
|---|---|---|---|---|
| 1122_154 | 56.5 | 42.4 | 89.3 | 314.4 |
| 1122_156 | 53.2 | 33.4 | 50.1 | 88.7 |
| 1816_28 | 128.4 | 653.3 | 926.1 | 1465.0 |
| 1605_4 | 76.7 | 33.6 | 47.3 | 71.8 |
| 1816_65 | 70.9 | 51.0 | 184.2 | 692.3 |
| 1122_91 | 115.5 | 76.9 | 171.6 | 748.0 |
| 1122_107 | 74.6 | 20.7 | 19.0 | 35.1 |
| 1122_172 | 66.1 | 50.1 | 90.4 | 306.1 |
| 1816_42 | 196.0 | 262.0 | 546.3 | 830.7 |
| 1816_43 | 97.2 | 68.5 | 136.1 | 709.8 |
| Negative control | ND | ND | ND | ND |

*ND Value was not possible to determine due to the available data

[0446] The calculated EC50 values for each compound for each of the time points are shown in Table 19. From the data it can be seen that there was a wide range of obtained EC5 values forth different compounds at the different time points. Generally there were some compounds showing high EC50 values indicating a low potency which also decreases (higher value) over time. Examples of these are compound TD NOs 1816_28, and 1122_172. On the other hand, there were also compounds which maintained a high potency (low value for EC50) over the duration of 40 days, showing EC50 values below 100 nM. Examples of these compounds are compound ID NOs 1122_156, 1605_4 and 1122_107. A low EC15 value is a beneficial property of a compound because it indicates that a lower amount of compound is required to elicit an effect.

TABLE 20
Efficacy in hiPSC-derived neurons following
addition of 3.2 μM compound.

| | % remaining transcript in hiPSC-derived neurons | | | |
|---|---|---|---|---|
| | after treatment with 3.2 μM compound | | | |
| CMP ID | Day 4 | Day 20 | Day 29 | Day 40 |
| 1122_154 | 6.3 | 4.4 | 11.5 | 19.0 |
| 1122_156 | 6.8 | 5.0 | 7.8 | 16.0 |
| 1816_28 | 13.2 | 29.6 | 32.3 | 50.5 |
| 1605_4 | 8.7 | 3.3 | 2.9 | 4.5 |
| 1816_65 | 7.5 | 8.2 | 13.1 | 22.7 |
| 1122_91 | 10.5 | 8.0 | 15.5 | 32.5 |
| 1122_107 | 8.3 | 4.5 | 4.3 | 6.0 |
| 1122_172 | 7.1 | 4.8 | 8.2 | 22.0 |
| 1816_42 | 9.8 | 15.2 | 23.6 | 46.3 |
| 1816_43 | 7.1 | 7.8 | 9.8 | 20.9 |
| Negative control | 93.5 | 95.1 | 94.1 | 115.8 |

[0447] Table 20 show the observed levels of remaining mRNA (% remaining transcript compared to PBS control) in the cells following a treatment of the cells with 3.2 μM of compound as described above. The evaluation was performed at multiple time points after compound addition. From the table it is clear that many of the compounds were able to maintain a suppression of the level of mRNA over the duration of 40 days following a single exposure to compound. A number of compounds were able to maintain a suppression of more than 90% for the duration of 40 days—such as compound ID NOs 1605_4 and 1122_107. Furthermore, compound ID NO 1122_156 showed a high level of knockdown for the duration of 40 days. A high level of knockdown over a long period indicates a long duration of action and potential for a more infrequent administration.

### Example 19: In Vivo Assessment in Transgenic Animals of Efficacy and Duration of Action

### Materials and Methods:

[0448] A further in vivo study was performed using compound ID NOs 1605_4, 1122_107 and 1122_156. The study used male and female B6; CBA-Tg(ATXN3*)84.2Cce/IbezJ mice with the compounds administered via intra cisterna magna (ICM) administration. At three time points after compound administration, 4, 8 and 11 weeks, animals were euthanized and terminal plasma samples and tissues were collected.

### Animal Care

[0449] In vivo activity and tolerability of the compounds were tested in 62 B6; CBATg(ATXN3*)84.2Cce/IbezJ male and female mice (JAX® Mice, The Jackson Laboratory) at the age of 10 weeks. Following arrival, animals were housed in groups up to 5 in individually vented cages (IVC, 38×22×15 cm) in a temperature (22±2° C.) and humidity (55±15%) controlled environment on a 12 hour light cycle (07.00-19.00 h). Males and females were kept in separate cages. Standard diet (SDS Diets, RM1 PL) and domestic quality mains water were available ad libitum. If required, animals received soaked chow and/or Royal Canin in addition to standard diet as part of pamper care. The experiments were conducted in strict accordance with the Guide for the Care and Use of Laboratory Animals (National Research Council 2011) and were in accordance with European Union directive 2010/63 and the Dutch law.

### Administration Route—Intra-Cisterna Magna Injections.

[0450] The compounds were administered to mice by intra cisterna magna (ICM) injections. Mice were anesthetized using isoflurane (2.5-3% and 500 mL/min O2). Before surgery, Finadyne (1 mg/kg, s.c.) was administered for analgesia during surgery and the post-surgical recovery period. A mixture of bupivacaine and epinephrine was applied to the incision site and periost of the skull for local analgesia. Animals were placed in a stereotaxic frame (Kopf instruments, USA) and an incision made at the back of the head towards the neck. Then, the skin was spread and the coordinates marked prior to drilling a hole in the occipital bone of the skull, where a cannula was placed. Next, the compounds were injected into the cisterna magna (ICM). A volume of 10 μL of the assigned test item was injected over 30 seconds. After injection, the needle and cannula were held in place for 30 seconds to ensure no back flow occurred. The cannula was then retracted, the hole was covered with skin and the incision was closed by sutures. Animals were placed in a warm environment until recovered from the procedure. The compounds were administered as a single dose as listed in Table 21. Each group contained 4-6 animals.

TABLE 21
Treatment regimes.

| | Dose of compound in 10 μl | Weeks of |
|---|---|---|
| Compound ID NO | volume | treatment |
| 0.9% Saline | — | 4 |
| 1605_4 | 20 μg/μl equals 200 μg | 4, 8, 11 |
| | compound | |
| 1122_107 | 20 μg/μl equals 200 μg | 4, 8, 11 |
| | compound | |
| 1122_156 | 20 μg/μl equals 200 μg | 4, 8, 11 |
| | compound | |

[0451] At the end of the experiment, after week 4, 8 and 11, the animals were euthanized by Euthasol® overdose. Terminal plasma was collected in Li-Hep tubes. Terminal tissues were harvested from the animals and were dissected on a chilled surface. Half of the tissue samples were stored in 2.0 mL Safe-Lock tubes, PCR clean, pre-weighted and precooled. Immediately after collection, samples were weighed and flash frozen in liquid N2 prior to storage at −80° C. The other half was fixed in 4% PFA for 72 hours and subsequently transferred to 70% ethanol awaiting shipment. Tissue dissection and collection was performed, collecting tissue from a range of tissues: Cortex, Cerebellum, Brainstem, Midbrain and Striatum. There were no signs of acute toxicity of any of the administered compounds and hence no premature termination of animals due to compound related toxicity.

[0452] Analysis of in vivo samples: Description of tissue preparation for content measurement and qPCR was performed as per Example 8. The median knockdown of target mRNA achieved was recorded as percent remaining target transcript relative to saline control group—this data is provided in Table 22.

### Results:

TABLE 22
Knock down data for each compound for each time point.

| | | Cortex | Cerebellum | Brainstem | Midbrain | Striatum |
|---|---|---|---|---|---|---|
| | | Median KD | Median KD | Median KD | Median KD | Median KD |
| | | (% remaining | (% remaining | (% remaining | (% remaining | (% remaining |
| Tissue | | transcript) | transcript) | transcript) | transcript) | transcript) |
| 4 week of | 1605_4 - 200 μg | 19 | 34 | 8 | 5 | 34 |
| treatment | 1122_107 - 200 μg | 35 | 31 | 14 | 8 | 41 |
| | 1122_156 - 200 μg | 53 | 44 | 16 | 12 | 53 |
| 8 week of | 1605_4 - 200 μg | 56 | 41 | 22 | 12 | 67 |
| treatment | 1122_107 - 200 μg | 43 | 30 | 25 | 17 | 33 |
| | 1122_156 - 200 μg | 76 | 46 | 46 | 38 | 72 |
| 11 week of | 1605_4 - 200 μg | 65 | 50 | 38 | 21 | 73 |
| treatment | 1122_107 - 200 μg | 82 | 41 | 46 | 39 | 75 |
| | 1122_156 - 200 μg | 99 | 70 | 70 | 75 | 100 |

[0454] Overall, it can be seen that the brainstem and the midbrain were the brain areas targeted most efficiently across all compounds when focusing on knock down efficacy.

### Example 20: WT and polyQ Ataxin 3 Protein Levels in Human SCA3 Patient Derived Fibroblasts Treated with Selected Oligonucleotides (ASO)

### Materials and Methods:

[0455] This experiment was performed to investigate the efficacy of knock down of the tested antisense oligonucleotides. The study was largely performed as described in Example 12.

[0456] The evaluation was performed in the SCA3 patient derived fibroblasts, allowing for an assessment of the efficacy on the disease causing ataxin3 allele and the ataxin3 WT allele.

[0457] The cell line used for the ASO treatment was human SCA3 patient derived fibroblasts (GM06153—Coriell Institute). Twenty thousand cells were seeded per well in a 24 well plate with a total volume of 1 ml. ASOs were added immediately after to a final concentration of 5 μM (gymnotic uptake). After 4 days of incubation, cells were washed twice with PBS, and harvested in 50 μl LDS sample buffer (NuPAGE, Thermo Scientific) with addition of 50 mM fresh DTT.

[0458] Western blots were performed on the capillary-based immunoassay platform (WES, ProteinSimple) using a WES 12-230 kDa Wes Separation Module. Cell lysates were diluted 10× in Sample load buffer (ProteinSimple) prior to loading on the cartridge. Primary antibody for Ataxin 3 (rabbit monoclonal antibody, prod. #702788 from Invitrogen) and for HPRT (rabbit monoclonal antibody, cat. #Ab109021 from Abcam). Both antibodies were used in 1/100 dilutions. Goat anti-rabbit HRP conjugate (Part. #DM-001, ProteinSimple) was used as secondary antibody.

[0459] Compass software (ProteinSimple) was for quantification of the protein bands.

### Results:

[0460] Ataxin 3 antibody recognized both isoforms, and the intensity (area under peak) was normalized to the protein input based on the signal from HPRT. The raw data are shown in FIGS. 12 and 13, and are quantified as described in FIG. 14.

[0461] Difference between allele selectivity was evaluated using an ordinary t-test, (unpaired, two-tailed, homoscedastic, calculated using Microsoft Excel, 2016, version 16 0.5227.1000) for each compound comparing the level of each detected allele. A difference (α=0.05) was observed for compound ID NOs 1287095 and 1122_156.

[0462] The effect on protein knock down was evaluated for each allele (e.g. wild type and polyQ expanded allele, individually) and compared to the negative control using an ordinary one-way ANOVA test with Dunnett correction for multiple testing (Calculated using GraphPad Prism, version 8.4.2 (679)). Some level of a decrease in protein from both WT and polyQ allele was observed for all compounds except for compound ID NO 1287095, where no decrease was observed for either allele using an effective concentration of compound of 5 μM.

[0463] In summary it can be observed in FIGS. 12 to 14 that compound ID NOs 1605_2, 1605_4, 1122_107 and 1122_156 effectively induce a knockdown of target protein—both wild type and polyQ expanded version—and that compound ID NO 1122_156 additionally has a statically significant increased effect on the polyQ expanded allele. A higher activity on the disease causing polyQ extended Ataxin 3 than the WT Ataxin 3 is preferable as it allows a selective reduction of the disease causing allele. The reference compounds 1287095 and 1102579 did not induce a significant reduction of either of the versions of the target protein under the tested conditions.

[0464] This experimental setup also measured the resulting effect on mRNA level following treatment with the compounds shown in FIG. 14. The data are not shown, but the analysis was performed exactly as described in Example 22. The effect of the compounds on the ATXN3 mRNA level followed the same pattern as did the protein levels. This means that when a high level of protein knock down was observed, there was also observed a high level of mRNA knock down and vice versa, as shown in Example 22.

### Example 21: Knock Down of WT Ataxin 3 Protein Levels in Human SK-N-AS Cell Line Treated with Selected Oligonucleotides (ASO)

### Materials and Methods:

[0465] This experiment was performed to investigate the efficacy of efficacy of knock down of the tested antisense oligonucleotides. The evaluation was performed in SK-N-AS cells (cell line listed in Table 2), allowing for an assessment of the efficacy on ataxin3 alleles and related protein production. Twenty five thousand cells were seeded per well in a 24 well plate with a total volume of 500p. In three replicate wells, ASOs were added immediately after to a final concentration of 5 μM (gymnotic uptake). The reference compounds 1287095 and 1102579 were additionally tested in a concentration of 15 μM. After 4 days of incubation, cells were washed twice with PBS, and harvested in 100 μl LDS sample buffer (NuPAGE, Thermo Scientific) with addition of 50 mM fresh DTT. Western blots were performed on the capillary-based immunoassay platform (WES, ProteinSimple) using a WES 12-230 kDa Wes Separation Module. Cell lysate were diluted 10× in Sample load buffer (ProteinSimple) prior loading on the cartridge. Primary antibody for Ataxin 3 (rabbit monoclonal antibody, prod. #702788 from Invitrogen) and for HPRT (rabbit monoclonal antibody, cat. #Ab109021 from Abcam). Both antibodies were used in 1/100 dilutions. Goat anti-rabbit HRP conjugate (Part. #DM-001, ProteinSimple) was used as secondary antibody. Compass software (ProteinSimple) was for quantification of the protein bands.

[0466] The effects of the above mentioned compounds were also evaluated on transcript level by digital droplet PCR (ddPCR) analysis in a similar setup. Cells were treated similarly to the cells used for protein determination with respect to compound concentrations and time points. The SK-N-AS cell line was used for the ASO treatment, with 10.000 cells seeded per well in a 96 well plate with a total volume of 0.1 ml. ASOs were added immediately after to a final concentration of 5 μM and for compounds 1287095 and 1102579 also with 15 μM (gymnotic uptake). After 4 days of incubation, cells were washed twice with PBS, and harvested in 200 μl RIPA buffer (Thermo Scientific, Pierce). The purified RNA was denatured before cDNA synthesis. cDNA was created using the iScript Advanced cDNA Synthesis Kit for RT-qPCR (Biorad) according to the manufacturer's instructions. Measurements of the expression levels of the target genes was done by droplet digital PCR using the QX200 droplet system (Bio-Rad) together with the QX200 software standard edition.

[0467] The following assays were used for the analysis:

qPCR probe and primers set:
PrimeTime® XL qPCR Assay (IDT)—ATXN3_exon_8-9(1)

Probe:
(SEQ ID NO: 1134)
5′-/56-FAM/CTCCGCAGG/ZEN/GCT ATTCAGCT AAGT /
31ABkFQ/-3′
Primer 1:
(SEQ ID NO: 1135)
5′-AGT AAGATTTGT ACCTGATGTCTGT-3′
Primer 2:
(SEQ ID NO: 1136)
5′-CATGGAAGATGAGGAAGCAGAT-3′

Reference Gene was hHPRT
PrimeTime® XL gPCR Assay (IDT)—Hs.PT.58v. 45621572

Probe:
(SEQ ID NO: 2042)
5′- /5HEX/AGCCTAAGA/ZEN/TGAGAGTTCAAGTTGAGTTTGG/
3IABkFQ/-3′
Primer 1:
(SEQ ID NO: 2043)
5′- GCGATGTCAATAGGACTCCAG-3′
Primer 2:
(SEQ ID NO: 2044)
5′- TTGTTGTAGGATATGCCCTTGA-3′

[0468] The resulting evaluation of the remaining mRNA level following compound treatment is presented in FIG. 18.

### Results:

[0469] Ataxin 3 antibody recognizes the wild type Ataxin 3 protein expressed by the cells, and the intensity (area under peak) was normalized to the protein input based on the signal from HPRT. The raw data are shown in FIG. 15 and FIG. 16 (Reference compounds including negative and positive controls), and the quantification is shown in graphical format in FIG. 17.

[0470] The effect on protein knock down for each of the tested compounds was evaluated by comparison to the negative PBS control using an ordinary one-way ANOVA test with Dunnett correction for multiple testing (Calculated using GraphPad Prism, version 8.4.2 (679)). A decrease in protein levels were observed for all compounds with p-value<0.001 compared to PCR control samples. From the raw WES data (FIG. 15 and FIG. 16) and the quantification (FIG. 17) it is clear that there are pronounced differences in the level of protein knock down between the compounds. The compounds 1605_2, 1605_4, 1122_107 and 1122_156 were very efficacious in knocking down Ataxin 3 protein using the effective concentrations of 5 μM. The reference compounds 1287095 and 1102579 were both less efficacious. Reference compounds 1287095 and 1102579 were unable to induce the same level of effect (level of protein knockdown) as the best performing compounds even when used in a disadvantageously high concentration (15 μM, 3 times higher than the other respective doses of 5 μM).

[0471] FIG. 18 shows the efficacy of the compounds with the listed applied concentrations in terms of knockdown of the ATXN3 encoding transcript. The mRNA knock down follows the same pattern as observed for the protein quantification shown in FIG. 17. Again it is observed that the compound ID NOs 1605_2, 1605_4, 1122_107 and 1122_156 are more efficacious at reducing ATXN3 mRNA levels compared to compounds 1287095 and 1102579. Again, a three times higher applied concentration of compounds 1287095 and 1102579 still did not obtain a level of efficacy which was as high as that of the best performing compounds.

1. An antisense oligonucleotide selected from the group consisting of Compound ID Nos. 1605_2, 1605_4, 1605_3, 1605_5, 1605_23, 1809_8, 1810_39, 1812_4, 1813_4, 1813_15, and 1813_16, or a pharmaceutically acceptable salt thereof.

2. An antisense oligonucleotide according to claim 1 of the following chemical annotation:
a) ^{[LR]}T_{[sP]}. ^{[LR][5me]}C_{[sP]}. ^{[dR]}T_{[sP]}. ^{[LR]}T_{[sP]}. ^{[dR]}C_{[sP]}. ^{[LR]}A_{[sP]}. ^{[dR]}T_{[sP]}. ^{[dR]}T_{[sP]}. ^{[dR]}A_{[sP]}. ^{[dR]}C_{[sP]}. ^{[dR]}C_{[sP]}. ^{[dR]}A_{[sP]}. ^{[dR]}T_{[sP]}. ^{[LR][5me]}C_{[sP]}. ^{[LR]}A_{[sP]}. ^{[LR]}A (SEQ ID NO:1605) (Compound ID No. 1605_2);
b) ^{[LR]}T_{[sP]}. ^{[LR][5me]}C_{[sP]}. ^{[dR]}T_{[sP]}. ^{[LR]}T_{[sP]}. ^{[dR]}C_{[sP]}. ^{[dR]}A_{[sP]}. ^{[dR]}T_{[sP]}. ^{[dR]}T_{[sP]}. ^{[dR]}A_{[sP]}. ^{[dR]}T_{[sP]}. ^{[dR]}A_{[sP]}. ^{[dR]}C_{[sP]}. ^{[dR]}C_{[sP]}. ^{[dR]}A_{[sP]}. ^{[dR]}T_{[sP]}. ^{[LR][5me]C}_{[sP]}. ^{[LR]}A_{[sP]}. ^{[LR]}A (SEQ ID NO:1605) (Compound ID No. 1605_4);
c) ^{[LR]}T_{[sP]}. ^{[LR][5me]}C_{[sP]}. ^{[dR]}T_{[sP]}. ^{[dR]}T_{[sP]}. ^{[dR]}C_{[sP]}. ^{[dR]}A_{[sP]}. ^{[dR]}T_{[sP]}. ^{[dR]}T_{[sP]}. ^{[dR]}A_{[sP]}. ^{[dR]}T_{[sP]}. ^{[dR]}A_{[sP]}. ^{[dR]}C_{[sP]}. ^{[dR]}C_{[sP]}. ^{[dR]}A_{[sP]}. ^{[dR]}T_{[sP]}. ^{[LR][5me]}C_{[sP]}. ^{[LR]}A_{[sP]}. ^{[LR]}A (SEQ ID NO:1605) (Compound ID No. 1605_3);
d) ^{[LR]}T_{[sP]}. ^{[LR][5me]}C_{[sP]}. ^{[LR]}T_{[sP]}. ^{[dR]}T_{[sP]}. ^{[LR][5me]}C_{[sP]}. ^{[dR]}A_{[sP]}. ^{[dR]}T_{[sP]}. ^{[dR]}T_{[sP]}. ^{[dR]}A_{[sP]}. ^{[dR]}T_{[sP]}. ^{[dR]}A_{[sP]}. ^{[dR]}C_{[sP]}. ^{[dR]}C_{[sP]}. ^{[dR]}A_{[sP]}. ^{[LR]}T_{[sP]}. ^{[LR][5me]}C_{[sP]}. ^{[LR]}A_{[sP]}. ^{[LR]}A (SEQ ID NO:1605) (Compound ID No. 1605_5);
e) ^{[LR]}T_{[sP]}. ^{[LR][5me]}C_{[sP]}. ^{[dR]}T_{[sP]}. ^{[dR]}T_{[sP]}. ^{[LR][5me]}C_{[sP]}. ^{[dR]}A_{[sP]}. ^{[dR]}T_{[sP]}. ^{[dR]}T_{[sP]}. ^{[dR]}A_{[sP]}. ^{[dR]}T_{[sP]}. ^{[dR]}A_{[sP]}. ^{[dR]}C_{[sP]}. ^{[dR]}C_{[sP]}. ^{[LR]}A_{[sP]}. ^{[LR]}T_{[sP]}. ^{[LR]}C_{[sP]}. ^{[LR]}A_{[sP]}. ^{[LR]}A (SEQ ID NO:1605) (Compound ID No. 1605_23);
f) ^{[LR]}G_{[sP]}. ^{[LR]}T_{[sP]}. ^{[LR]}A_{[sP]}. ^{[dR]}C_{[sP]}. ^{[LR]}A_{[sP]}. ^{[dR]}C_{[sP]}. ^{[dR]}T_{[sP]}. ^{[dR]}T_{[sP]}. ^{[dR]}T_{[sP]}. ^{[dR]}T_{[sP]}. ^{[dR]}A_{[sP]}. ^{[dR]}C_{[sP]}. ^{[LR]}A_{[sP]}. ^{[dR]}T_{[sP]}. ^{[dR]}C_{[sP]}. ^{[dR]}C_{[sP]}. ^{[LR][5me]}C_{[sP]}. ^{[LR][5me]}C (SEQ ID NO:1809) (Compound ID No. 1809_8);
g) ^{[LR]}T_{[sP]}. ^{[LR]}A_{[sP]}. ^{[dR]}C_{[sP]}. ^{[LR]}A_{[sP]}. ^{[dR]}C_{[sP]}. ^{[LR]}T_{[sP]}. ^{[dR]}T_{[sP]}. ^{[dR]}T_{[sP]}. ^{[dR]}T_{[sP]}. ^{[dR]}A_{[sP]}. ^{[dR]}C_{[sP]}. ^{[dR]}A_{[sP]}. ^{[dR]}T_{[sP]}. ^{[LR]}T_{[sP]}. ^{[dR]}C_{[sP]}. ^{[LR][5me]}C_{[sP]}. ^{[LR][5me]}C (SEQ ID NO:1810) (Compound ID No. 1810_39);
h) ^{[LR]}T_{[sP]}. ^{[LR]}G_{[sP]}. ^{[dR]}T_{[sP]}. ^{[dR]}A_{[sP]}. _{[dR]}C_{[sP]}. _{[dR]}A_{[sP]}. ^{[dR]}C_{[sP]}. ^{[LR]}T_{[sP]}. ^{[dR]}T_{[sP]}. ^{[dR]}T_{[sP]}. ^{[dR]}T_{[sP]}. ^{[dR]}A_{[sP]}. ^{[dR]}C_{[sP]}. ^{[dR]}A_{[sP]}. ^{[dR]}T_{[sP]}. ^{[LR]}T_{[sP]}. ^{[LR][5me]}C_{[sP]}. ^{[LR][5me]}C (SEQ ID NO: 1812) (Compound ID No. 1812_4);
i) ^{[LR][5me]}C_{[sP]}. ^{[LR]}T_{[sP]}. ^{[LR]}G_{[sP]}. ^{[dR]}T_{[sP]}. ^{[dR]}A_{[sP]}. ^{[dR]}C_{[sP]}. ^{[LR]}A_{[sP]}. ^{[dR]}C_{[sP]}. ^{[dR]}T_{[sP]}. ^{[dR]}T_{[sP]}. ^{[dR]}T_{[sP]}. ^{[dR]}T_{[sP]}. ^{[dR]}A_{[sP]}. ^{[dR]}C_{[sP]}. ^{[dR]}A_{[sP]}. ^{[LR]}T_{[sP]}. ^{[LR]}T_{[sP]}. ^{[LR][5me]}C (SEQ ID NO:1813) (Compound ID No. 1813_4);
j) ^{[LR][5me]}C_{[sP]}. ^{[LR]}T_{[sP]}. ^{[LR]}G_{[sP]}. ^{[dR]}T_{[sP]}. ^{[dR]}A_{[sP]}. ^{[mR]}C_{[sP]}. ^{[mR]}A_{[sP]}. ^{[dR]}C_{[sP]}. ^{[dR]}T_{[sP]}. ^{[dR]}T_{[sP]}. ^{[dR]}T_{[sP]}. ^{[dR]}T_{[sP]}. ^{[dR]}A_{[sP]}. ^{[dR]}C_{[sP]}. ^{[dR]}A_{[sP]}. ^{[LR]}T_{[sP]}. ^{[LR]}T_{[sP]}. ^{[LR][5me]}C (SEQ ID NO:1813) (Compound ID No. 1813_15); or
k) ^{[LR][5me]}C_{[sP]}. ^{[LR]}T_{[sP]}. ^{[LR]}G_{[sP]}. ^{[dR]}T_{[sP]}. ^{[dR]}A_{[sP]}. ^{[mR]}C_{[sP]}. ^{[dR]}A_{[sP]}. ^{[mR]}C_{[sP]}. ^{[dR]}T_{[sP]}. ^{[dR]}T_{[sP]}. ^{[dR]}T_{[sP]}. ^{[dR]}T_{[sP]}. ^{[dR]}A_{[sP]}. ^{[dR]}C_{[sP]}. ^{[dR]}A_{[sP]}. ^{[LR]}T_{[sP]}. ^{[LR]}T_{[sP]}. ^{[LR][5me]}C (SEQ ID NO:1813) (Compound ID No. 1813_16);
or is a pharmaceutically acceptable salt thereof, wherein
[LR] is a beta-D-oxy-LNA nucleoside,
[LR][5me]C is a beta-D-oxy-LNA 5-methyl cytosine nucleoside,
[dR] is a DNA nucleoside,
[sP] is a phosphorothioate internucleoside linkage (stereo undefined), and
[mR] is a 2′-O-methyl nucleoside.

3. The antisense oligonucleotide according to claim 1, which is the antisense oligonucleotide shown in FIG. 11A (Compound ID No. 1605_2); or a pharmaceutically acceptable salt thereof.

4. The antisense oligonucleotide according to claim 1, which is the antisense oligonucleotide shown in FIG. 11C (Compound ID No. 1605_4); or a pharmaceutically acceptable salt thereof.

5. The antisense oligonucleotide according to claim 1, which is the antisense oligonucleotide shown in FIG. 11B (Compound ID No. 1605_3); or a pharmaceutically acceptable salt thereof.

6. The antisense oligonucleotide according to claim 1, which is the antisense oligonucleotide shown in FIG. 11D (Compound ID No. 1605_5); or a pharmaceutically acceptable salt thereof.

7. The antisense oligonucleotide according to claim 1, which is the antisense oligonucleotide shown in FIG. 11E (Compound ID No. 1605_23); or a pharmaceutically acceptable salt thereof.

8. The antisense oligonucleotide according to claim 1, which is the antisense oligonucleotide shown in FIG. 11G (Compound ID No. 1809_8); or a pharmaceutically acceptable salt thereof.

9. The antisense oligonucleotide according to claim 1, which is the antisense oligonucleotide shown in FIG. 11H (Compound ID No. 1810_39); or a pharmaceutically acceptable salt thereof.

10. The antisense oligonucleotide according to claim 1, which is the antisense oligonucleotide shown in FIG. 11I (Compound ID No. 1812_4); or a pharmaceutically acceptable salt thereof.

11. The antisense oligonucleotide according to claim 1, which is the antisense oligonucleotide shown in FIG. 11J (Compound ID No. 1813_4); or a pharmaceutically acceptable salt thereof.

12. The antisense oligonucleotide according to claim 1, which is the antisense oligonucleotide shown in FIG. 11K (Compound ID No. 1813_15); or a pharmaceutically acceptable salt thereof.

13. The antisense oligonucleotide according to claim 1, which is the antisense oligonucleotide shown in FIG. 11K (Compound ID No. 1813_16); or a pharmaceutically acceptable salt thereof.

14. A conjugate comprising an oligonucleotide according to claim 1, and at least one conjugate moiety covalently attached to said oligonucleotide; or a pharmaceutically acceptable salt thereof.

15. A pharmaceutical composition comprising an oligonucleotide according to claim 1 or a conjugate thereof and a pharmaceutically acceptable diluent, solvent, carrier, salt and/or adjuvant.

16. An in vivo or in vitro method for modulating ATXN3 expression in a target cell which is expressing ATXN3, said method comprising administering an oligonucleotide selected from a group consisting of Compound ID Nos. 1605_2, 1605_3, 1605_4, 1605_5, 1605_23, 1809_8, 1810_39, 1812_4, 1813_4, 1813_15, and 1813_16, a conjugate, a salt, or a pharmaceutical composition thereof in an effective amount to said cell.

17. A method for treating or preventing a disease comprising administering a therapeutically or prophylactically effective amount of an oligonucleotide selected from a group consisting of Compound ID Nos. 1605_2, 1605_3, 1605_4, 16055, 1605_23, 1809_8, 1810_39, 1812_4, 1813_4, 1813_15, and 1813_16, a conjugate, a salt, or a pharmaceutical composition thereof to a subject suffering from or susceptible to the disease.

18. The method of claim 17, wherein the disease is spinocerebellar ataxia, such as spinocerebellar ataxia 3, such as Machado-Joseph disease

19. The oligonucleotide, a conjugate, a salt, or a pharmaceutical composition thereof according to claim 1 for use in medicine.

20. The oligonucleotide, a conjugate, a salt, or a pharmaceutical composition thereof according to claim 1 for use in the treatment or prevention of spinocerebellar ataxia, such as spinocerebellar ataxia 3, such as Machado-Joseph disease, (MJD).

21. Use of the oligonucleotide, a conjugate, a salt, or a pharmaceutical composition thereof according to claim 1 for the preparation of a medicament for treatment or prevention of spinocerebellar ataxia, such as spinocerebellar ataxia 3, such as Machado-Joseph disease.

The application's sequence listing, which the Patent Office published only in electronic form, follows.

SEQUENCE LISTING (2044 sequences)

SEQ ID NO: 1 - DNA, 62130 bp, hsapiens
ggaggagaggggcagggggcggagctggagggggtggttcggcgtgggggccgttggctccagacaaataaacatggagtccatcttccacgagaaagtgagtgtccgcgttcggtggggagctgtctgccgcgcggtggcgggcgtggagcgcggcatcaccgcctctcggagggctgggtggggcccgagtcgcccccatgccgatctcgcccggcgaggggcgacgccgcagcctcccgcctcctcggctcgaggaggggagcatcacctacgcccctacttcccccgcggcccccgccctgggagccgggagggagtatgggcggggccgggggcgtctcgggacacgggagtggggtggcgcccagtgggtttgcttctgcctttctccgtcactttccatcgcttttcggaggattccttcacccctccccaatccttccctctccctagggtctagctagagtcatctctgggacacctccctcaacccctcctaccctaatcctggcagaattaacttttcctcctccggactgctcaattctatattggagtcttccctacacgtagatctttggggtcttgttcgtgtctttcccctgcactaggtccgcgagcctcccgagggaggagaccttggctcgcccactgtagggcctgacatttaggaagtgaagtaggaaacccggcgtgcccctaaacagggaagtcgtcacaagagtttttattacgggatgtttgggtttggtttcttttggtactcccatctttccggagcaggcggccagctttgtttttaggtattaggagtggactgggatgattttgttgtagtctgcctagcctgctgtccctttaactcttccgtgaccatgcacttgaagatactgtttgtgatatgtaaagaaactcctcgtttctctcatactattatccagccatttgtgtgtgagtgaagccttccccaggacagctttggcacatggtatcatgtttcataatagtttcgtgtttggaaagagttgctggtaaggctgttatttaataggaggagcaaagggtttttgttttattaaatacttataaatgatcatttatcccagacatttaaaattcacacacacacaacaaataaagcaaagacaaaagaatacatttaccaaatgtaaatctgtagcataaattttttttaatttttattttaaagatggggtctcattctgtcacccaggcaggtgtgcaatggagagatcatggctcactgcagccttgatctcctaggcacaagcgatcctcccgcctctgcctccagagtagctgggactacaggtgcatatcgccagggccaggtaatgtttttgggagagacggggtctcgctgtgttgcccaggctggtctcgaactcctggactcaggtgattctcccacctcggcctctcgaagtgctgtgattacaggcgtgagccactgtgcctggaacaaattgttaagtacaatgcttttcattgtagaaaacatctcggaaacttttgaaataggctgatgttcagtgggggaggaaggactcagtcgtatagttgtcactaattttttgacttgattgacatgactcgtaaatcatagacaatagagatttggttgcttggctgagtagagtgcgtgaaaaatacacacgtacttttttttttttttttttgagatggagtttggctcttgtcacccaggctggagtgcaatggcgccatcatggctcactgcaacctccgcctccccgttcaagcgattctcctgcctcagtctccccagtagctgagattacaggcgcccgccaccacgcccagctaatttttgtatttttagtagagacagggtttcaccatgttggccaggctggtctccaactcctgacaggtggtccgcccgcctcggcctcccaaagtgctgggattacaggcgtgagccaccgcacccggccatatttttgttattaattttcaaaggctttggtgtgggaccacatttcaacatggaaggccttaaacatgttccacactacttcctgagaattagacaagatttttaacaatattgttacctagttgggacacatttgtactgacccatgggatgaaaaaaagctgagtgctagcctagtgaaaatctacttacccgaaagaaatccctcttagtctgggtgcagtggctcacaccagtgctttgggaggcccagacgggcggatcatgaggtcagtagtttgagaccagcctggccaacatggtgaaaccccgtctctactaaaaatacaaaaaattagccaggtgtggtggcaggcgcctgtaatcccaggtactctggaggctgaggcaggagaattgcttgaacccgagaggcagaggttgcagtgagccgagaccgtgccactgcacttcagcctgggcaacagagcgagactccgtctcaaaaaaaagaaaaggaaaaaagagtccctcttaattatcagcatgtgtataggcctacagatacttcaggaatacctttaccattatcatcaacttgtatctacatagcatgtgaagattcaacaatttagttttttgggcgtcctcaagagtacgcacctataaccatatggcccaattgttaatctcctatacagtccattctgggaatgtttgggcttactgtgccatttttccgttcactgccttcccctctgcaatatacctttaacccttgctaggtcctgggtttggagagccagagaaccaactttggccctaaagaagctgtgtaggtagcaatatctgcctacgaagggccttgcaaccatttcctcttggaaccttggtttcctctttctgagtagtcactttgagtaccctttattaagttagaatgtaaaaacagtttctcactgatatatctgcagtgcctgagagagggcctggcacagagtaagtactcaataaatatttgaatggggccgggcgtggtgagacctgtctctacaagaatgaacaaaattagctgggcgtgttagcacatgcctgtagacttgggaggctgaggtgggaggattgcatgagtctgggaggtcgaggctgtagtgagccatgatcgcaccactgcactccagcctaggggacagagcaagatcctgtctcaaaagaaaaaaatgtatatatttgaatggataaagagatggctttgagtttctgagatatatatggtgctgtttatctaaagtaaacaagttttctgtaaatattttaaggctttgcaggccagctgtagtctctgtcacacattcttatttgtgcatgtttttcccaaccatgtaaaaatgtaaagtgcattcttagctactggggcaggttgaatttggcccatgggctagagtttgccaacccctaacttaaacctttgtactaactttatgaccactactggatttttgttgttgtttgttttagttctggtgcctgctttgtttttttttttttttttaatcctcttgctgatgtttcttggtgcagttactgtgccatttgtattggtgcttttaatgtaatgcaaactggtaataatatctaaacttgctggggttgtacataaaattattgaaaagattgaaaagatgctgagcattgactctgtggcattcattatgcccttttgtgattgctggattttagccatctttaggacatttgagctttaggagaagccaaattctgtataaatgacttgaagtgctaatagcacaggttttgaaacctctgcctgggtttgagtctcagctctgccttttactacctgtgtgatcctgagcaagttacttagtatccctgtcctctagtttcctcctctgtagtgtggggataataacatagacataacctgagagttagagtgtagagaaggctccctggcagatagtgctgtagaagtactggccattgccattactcaggtgcttgtgtttgctgaacctcatagtaagggctcggagagcactaagaggaggtgagaaatgctgctagattgacagcttgtccccagatagcccattcccgagagcaccttaggtttatacctgatttgtgttgtagttagtagtgtctctggtaatttgaactagtttcaggttggtcttgaaaacctggggaggttgggggtaaatgatttggtagcagttctcttttgtgattttatacattatctttgtagaactgcagtttgctaattctctgagcccaacacaatgaagtctgggcctaaaatcatagaatttcttttatttttttttttgtttttaatttatttattccctccctccctcctttcttcctttcttccttttctttctttctttccttccttccttccttctttcttttctttctttcttttctttctttggagtctcactctgtcaccaggctggagtgcagtggcacgaactttcttcagagtctcactttgtcaccaggctggagtgcagtggcgcgaactcagctcactgcaacctccgtctcctgagttcaagagattctcctgcctcagcctcccgagtagctgggactataggcatgtgccaccatgcccagctaattttcttatttttagtagagacgaggtttcaccatgttggccaggatggtcttgatctcttgacctcgtgatccacctgcctcagcctcccaaagtgcggggattacaggcgtgagctaccacgcccagcctattttttattttttgaggcagagtctcactctgtcacccaggctggagtgcagtggtgcaatctcagctcactgcaacctccgcctcctgggttcaggtgattctcctgccttagcctcctgagcacctgggactacaggcgcctgccaccacacctggctaattcttatatttttagtagaggcggggtttcaccatgttggccaggctggtctcgaactcctgatctcaagtgatcaacctgccttggcctcccaaagtgctggaattacagccatgagccaccatgcccagccaaatcatgagatttcaataccgctgaactttgattatggcaaagtgaacttctgctttgattaaagcttgatgagagaggtggctggggatagtttgagataagggcaaggcaggaaaatgcataatcttacgtgggctcattgtcattgtacaattcttttggtccatgtggaatttgatccgtcctatgacttaagttatgtttatttttgtttttatttttatttattttgtgtctttttgagagacatgatgttgctctgtcacctgggccagaatacagtggcacaatcttagctccgtgtagccttgaactcctgggctcaagtgatcctcccacctcagcccctcaaacagttgagattatagtatgaaccactgtgcctagccttaagtgatttttaaatttgtactgaacagtttgtcctttccttccattaaatcatattagaagtacagaacttgatatttcctgtagcaatacagtttttctttgatgaagtttgatttcaagtacttatttttcataatttaaagctattttttatagagagaattttaatcaaatatttggatgtcactattgctatatatggtattaagtatggtgaccatagtttgtaaactccaaactgacagcaagacaggaaatttgtgttagcaaaggcttttttcttactgtttgaattttttaaaaattagatacaatacagagaggagcacacaaatcattaagagtacagctcagcgaattttcacacagtgaacatgtgtaaacagcaagtaacaaaagatttacctgcatcctataacctcccattattcccttttctaggtactgtctctccactgcattcccaccaaatataaccactatgctgaattctgacatcataaatgagttttgcctgattttgagcttttgtgactggaagtgtacagtgtatataccctttcgattctgtcctctttagtttaccattgtttgagaaatttatccatactgttccagaattaactactgttaattattgttaattaactactgttgtagttaattcatcctcattgttatctagtattcttttgtgagtaaacacaatttccattctactgtgatcccagctatccatttgggtcgtttccagtttggggtccattacaaatagtaatgctatctgtaatgctattttgtattactacaaatagtaatgctatttgtggcacaaaaatactgcttttgtgaacattcttatacatgtcttttgatgaatgtatgtttgcattgctgttgtttacattatgtacctagtaatggaattgctagatcataggagatgtatatattaagctttagtggatgcattacataattattagttattattggttataccaatttatcctctcatcagtagtatacaacagtttctgtatctctaatctccaacattttagccattttagagtttgtgtactaacacattgtggttttaatttacatttccctgatgactaataaagttgagtacctcttttgtgttctttatagccatttgactgtcttgtgaagtgcttgtttgtcttgcctatttttcttttctttctttctttttcttccttccttcctttctttctttcttctttctttccttccttcttttctttctttctgtctttctttcttgtctttcttgtctttctgtctttcttggtcttgccctgtcacccatgctggagtgcagtggtgcagtctcagcttactgtagcctcgacctttttggggctcaagttatcctcctttctcagcctcccaagaagctggactacaagcacgcaccaccatgctcagttaattttttattttttgtagaaatggggtttcaccatgttgtccaggctggtctcaaacttctgggctcaagtaatcctcctgccttggcctcccaaaatgctgggattacaggcatgagccaccgcagccagccttggctatttttcaaaaggatataagtagaacatctgtatatcccttcaatttgcatattattcagtaagagttgcactctggtagtagaaatatataaggaggagaaagaagtggaaacaaaaagtctattctcatgagaagacttgggggatagtgttctctctagctccaagctacttattccttacgaaaagttgaagataaacttatctcagactgaggctgtctcaatgttgtcttcctattccattatacacatataacccatatttttttcaccagctgaattttgctcctagaaaattgattcatcaggaaaaatatccgtcttgcaaggtggttctctttagagtctgctgtgtgacatagctcaggacaaattgtgtgatgtcagataggttgggttaaggaatagaccttattggggaaagagagaacttggagggccaaggttagcaggagaaggaaatgttctctcatctgccgtcaattcagggaggggcaaacctggtgtctgtgttcacagggagggatccatccatctgtgattctcccttcttatcaggtagcatgggaaagctacactgttgcggggaggagggtcacacgcaggctacttagtaccaggcaccctggacttggattcaggttgccagttgtgtgagaaactgcccagcacctgaaggccctgaacccatgagaagttgtacctacctcccatgaggaggaatcctgtcatcccatgggagctgagcttgggtgcagtccctcttgctggcttgtccaggagtgagctccagggttgtttgggacagttctgctcattgctttacactgtgtatacattatctgtagagttccatgaagagaacttcagcactgtaactgcaagttttaacatggaacagaatttttctcacctgtattaattcttaagatttgaagttctatcaacaagcatttagattgtgtggagatttttttatttttatttttggagacagagtcttgctctgttacccagactggagtggcagtggcatggtcttggctcactgcaggctctacttcctgggttcaagcgattctcatgcctcagtgtcctgattagctaggactacaggtacacaccaccatgctggctaatttttgtatttttagtagagacgaggtttcaccgtattggtcaggctggtctcgaactcccagcctcaagcagtccacccacctcggcctcccaaactgctgggattacaggtgtgagccaccatgcttgactgacatcatcatgttaaaagaataaatgttctagggagctgggcacagtgtcatgtttctgtagttctagctgctcgggaggctgaggcaggaagatcccttgagccctggagttcaagtccagcctgggcaacatagtgagatctctttttttaaataaataaataactgttctagggactaaaatttcctttcaccattagtaatttactgtagaatctccaagaatgaacttattttaggtactgaaaatgagggagactaaatgttttatacagtagtttttagtaaaatatgagatttgatgcatttgatagatgatgtttgtttaaaataattcttaaatttttgatcatgtaattatagtttcattaatggtagatttgtaaaataaatgttaccaaatgaaaatgcatgtacctatgttaattatccttatctaaagctgaaagttcagttcaactatgttaaaacatagtaggggcctggcagggtggctcttgcctgtaatcccagaacttagggaggccaaggtgggcagatcacgaggtcaggagatcgagaccatcctggctaacattgtgaaaccgtatcgctactaaaaatacaaaaaattagccgggcatggcggtgggcacctgtagtcgcagctacttggtaggctgaggcaggagaatggcgtgaactcaggaggcagagcttacagtgagccgagatcatgccactgcactccaggctgggtgacagagcaagactccatctcaaaaaaaaaaaaaaagttggccaggtgtggcggctcacacctgtaatcccagcacttttggaggccgaggcaggcggatcacaagatcaggagtttgagaccagcctggctaacagagtgaaaccctgtatatactaaaaatacaaaaattagccaggcatggtggtgcatgcctgtagtcccagctacttgagaggctgaggcaggagaatcacttgaacccgggaggcggaggttgtggtaagctgagattgctccactgcactccagcctggacaacagagcaagactctgtctcaaaaaaaaaaaaaattaatgattaaattatttaggggagccgggcgcagtggctcacgcctgtaatcccagcactttgggaggccaaggcgggcggatcacgaggtcaggagatcaagaccatcctggctaacacaggatgaaaccccgtctctactaaaaatacaaaaatttagccgggcgtggtggcgggtgcctgtagtaccagctactcgggaggctgaggcaggagaatggcatgaacccgggtggcggagcttgcagtgagccaagatagcgccactgcactccggcctgggtgaaagagtgagactccgtctcaaaaaaaaaaaaaaattatttaggggaagatactatacaattctgtttaacaagtcacattttaattttttcttttggaaatattagcaagaaggctcactttgtgctcaacattgcctgaataacttattgcaaggagaatattttagccctgtggaattatcctcaattgcacatcagctggatgaggaggagaggatgagaatggcagaaggaggagttactagtgaagattatcgcacgtttttacaggtactgattttaaactcactaagtcacatttcttttttttttttttttttgagacggagtctcgccctgttgcccatgctggagtgcaatggcgcgatctcggctcactgcaacctctgcctcccgggttcaagcgattctcctgcctcagcctcccaagtagctgggattacaggcacacggcactatgcccggctaattttttgtatctttgttagagatggggtttcaccatgttggtcaggttggtctcaaactcctgaccttatgatccacctgtcttggcctcccaaagtgctgggattataggtgtgagccaccacacccggcttacatttcttttaaaaatgtggataccatttagaaaaggatgggccattcttcctatagggatctgactggtgaattataactgtgctgttaactttggaaatgggaatgcacaagatattgttttaaatatgcacgctaatgacagtttgtatccttctttccccacccccacccttgcttcaactacctgtcaaaattaacagcagccttctggaaatatggatgacagtggttttttctctattcaggtaagtagtcacaagcatgtactatgtgttgcttacatcccaggcaccgtttcacagcctttcaatagtcactgtaacaaggcgaccttcggaagttcttctgtctacagagtatagattatactctagagtactagattttttttttcttgagacagagtctcgttctgtcacctaggctggagtgcagtggcgtgatcttggctcactgtagcctctgcctcccgggttcaagcgatcctcctgcctcagcctcccaagtagctgggattacaggcacccgccaccacaccagttaatatttgtatttttagtagagatagtggggtttcaccgtgttggccagtctggtctccaactcctgacctcagcctcccaaagtgctgggattacaggtgtgagccactgcacctggccaactagagtactagatttttatatagataaacatgaaaggattgtagaatcttcatattagagtggggcatttaaaaattccttcttgagaaagattaatttgcatctggatgctaataataaccttaattctggccgggcgcggtggctcacacctgtaatcccagcactttggggaggccgaggtgggcggatcacgaggtcaggagattgagaccatcctggctaacatggtgaaaccccgtctctactaaaaatacaaaaattagctggacgtggtgacacgtgcctgtaatcccagctactcgggaggctgaggcaggagaatcgcttgaaccagggagtcgtaggttgcagtgagccaagatcgcgccactgcactctagcctggtgacagagcgagactccatctcaaagaaaaaaagaaatccttaattctaataagtcacaatgtctcaaacttaccatctgttgggtaaatttgagaaaatgcaataccttgctaccatccttttaaatcagcctaccagactggatttccttattatggtttgtggcttttgattttttttttttaatgtatagctctctttgaattctttggtggttatatatatatgtactcgcaagattcttttatctgtgggtctttcattctttttctaacactgtgagttgtatccagagtactttcggaacctctcctgagcgacctatctctgcagatatctttgtttatgtttcccttgtactgccctcctggactcttcctcatccaccagcatttccatctagtgctttaccgtgccactgctaacaggtaatggctactgcagggctgaaatcagaggccagagtaggcccagcacttggcgtttcctatttgtgccttgctgctcttggtgcctgttcatgtgtgcccactaccttgcactcaatttctgtctttgctggtacctggctcacttgcttctttgttggctaccttggagggcagatagtgaattttcagaaatttccctttttttgtcagacagattgaaataaacaggtttgcattttgttttttctacaagcggcaagcccatgaccctagaagtctgacatctatggaaccttcagtttaaatgcccagggagaacttattttggtagatatgatttctgacattgcaggtagcaagttgaatataatttttctaaagtagcacccacagcagccaaattatcagatgtatatagtagactagttttaagaaaagcacttatgggtagaatatacatctggatttttgaggcagttttatttaggaattgtgtggttttctggaacatctcagagacctggtatgaaaagcactcttctaatatatatgtgtttttttttatggatttagtgatatatctatacacacacactttttaaaacctatagccggctgggcgtggtggctcatgcctgtaatcccagtactttgggaggcccaggcgggtggatcacaaggtcaggagattgagaccagcctggccaacaaggtgaaaccctgtctctactaaaaatacaaaaatagctgggtgtggtggcgtgtgcttgtaatcccagctactcgggagcctcaggaggagaatcgcttgaacctgggaggcggaggttgcagcgagccgagatcgtgccactatactccagcctgggcgacagagcaagactctgtcacaaaaaaaaaaaaaaaaacctatagccttctagagaaatttatatatgaagtacacaactaacatagctacacttcctaaatttggaatggagtggtttagcttatgaaaagttgctatttttcttaacaggttataagcaatgccttgaaagtttggggtttagaactaatcctgttcaacagtccagagtatcagaggctcaggatcgatcctatgtaagattctgttttgcatttcatacatttcttttcccaaatttgatttttaaagttgtaatttcttaaagaagagaaatacattttgaatacttttgttttgatgttccctgtttcattcactcagactttcctatttcacctttgtgatgtccatgagcatctgccctgtagccttcctggcaccccagtgtctgtggcagcacagagctgaccccataagtggtgcatgaggccatcttgtggcacagcatcactaagctgctgcagagacgttcatatggttgtgtgatcttttaaaaacatcagtgacacttaactataaatataatcttaaattatcacaaattttatataatatttgccagtagacaacataaatatgaattcaatatttcaagttaatattgtctgttttcttttttagaaatgaaagatcatttatatgcaattataaggaacactggtttacagttagaaaattaggaaaacaggtaacatttcttacccttccttgtctttttttcttatattgtaccccatttaaaactaaaatgtgggccaggtgtggtggctcatgccaacagtttgggaggctgaggtggggggatcacttgaagccaggagtttgagaccagcctgggcaacaaagggaggtcctgtctcttaaaaaaaaaataaaaataaaaataaaaataaataaaaaaaaaaacaaagagccaggcatggtggctcacatctgtaattccagcttacttggaaggctgagtcagaaggatcacttgagctcaggagtttgaggctgcagtgaactatgattttgtcactgtaccccagcctgggtgacagagtaagactgttctataaaacataaaaataaaaaaaatatatttaaaaattaaaaaaaaaaaaggattgctgactttaaaattaggaaactgaccagtaatgtgtgtgtgtgtagcatggtttatccttcttgatagatagaaattgtcattttaaaagataatatcagttttccttataaatttatttgtgacaagtatatgcaatttaactatatcataagaaaaattctatattaaagataatacaaatgtggttacttttaagtgggtttttatgtgatgactatgttctgtcagttaattattacatttatagatttgtatttagcatagtgctgtcacaaagcctgaaatagtgtcaagcatgaataaagcattcaattatgtttgctttagtgtaagattattcattatgattccaaaagccatgtaatacgtacgtctacagaaaatcacttctattttttaaataaaacatgaaatatgtcttgagcaagctattttaagaaacaatcatttaacgtccttgttattagaattttgaatctttgaaagagggttattgaaaaccagctaggacagtaaaaaagaataaactagtgatacatgcagcaatatggatgaatctcaaaataattatgctgaaagaataacccacaaacaaaatactacctgctgtatggtatcatttattaaaagtctagaaaagtgcagattcatctgtagtgatggaaagcagattgaccagcggttgcctggggacgagaaggctatggaggagtgagaggggagggttacagagaggcacgggaaacatggcaatgaggaatgtgttcactatcttggttgtagtaatggtttcatgggagtacagtatacaaatgtgaaaacatttcagaggccagatgcagtggctcatgcctgtaatcccagcacttttggaggccaaggcaggaggattgcttgagctcaaggagttcaggaccagcctgggcaatggcacaagaccccatctctaaaaaaaaaatgaaagaaaaaaaaattggctaggcgtggtgatgcatggccgtagtcccaggtgctagggaggctgaggagggagcacagaggtcaagcctgcagtgaatcatgatcgtgctactgcactccagcttgggtgacagaaggagatcctgtctcaaaaaaaaagtttcaaattatacactttaaatatgtgcagtttattatatgtcacttataccccaataaatctgttttttttaaaatgtaaatacaagccaaaaaaggtataagtcaagaaaatatattgaattaaatctgtaagagataattcaaaaacaaaaaccctattgttatcttttaagtcacccaaatcaaatttgggaaaagtcacctacttagcttcatcctaagttggttctttctttctttctttccttcttttgagacggattcttgctctatcgcccaggctggattgcagtggcgggatcttggctccctgcaacctccgccacctgggttcaagcaattctcttgtctcagcctcccaaatagctgtgtctacagccacgcaccaccacacccagctaatttttgtatttttagtagagacggggtttcgccatgttggtcaggctggtcttgaactcctgacctcaggtgatccgtccgtctctgcctctcaaagtgctggggttacaggcgtgagccaccatgccgagccctaagttggttctttcttaaagttcttcctgaggagccaagagcaagttaaggagatgtaacctagaagcttacagtggaggctagctgggtgcagtggttcacgcctgtaatcccagcactttaggaggctgaggcagggagatcactgaggccaggagcttgagagcagcttggcccaacacagtgacaccttgtctctacaaaaaaaaaaaaaaaaaaaggcagcttacagcagtagaggctgatgcgagtgggaatcacctctaggtaaaaaccagtgtagcgtactgctgagattatttaacctctgggttttatttatgtgtttttaaaaattatgatccagtattttttacttttttttgtataaagtaagcactgaatttttaaggttgtattaatttgcaaataaatgtctatcttattattttgagagatttaaaaaattttagttcttcaaaattgcattttcacattttgaattacgttatctttgacaaatacagaagatgtcaaattttggtttattttctttggttctaatttatatttttgtttaaaactatatttttcactatagactctttctgtctctcgaggtccctgtataatgaaaaagaaggctggaaaaagtattaacattgtcaaaatccaggaaaagtagttggtcatgatattgatcgttaactttagaaactttttgtatcttgtgggttaaattaggattactatgtggtagtgataaatgatgttaattagggccgagtgcagtggctaacacctgtaattccagcatgtagggaggctgaggtgggaggatgtcttgaatccaggagtttgagaccagcctgtacaacatagtgtaagaccccttctccacacaaaaaaattagaaaatttgtcaagcatcttggtgcacacctgtagtcccagctgcttgggaggatgaagcgagagaatcacttaagcccaggtgttcgaggctgcagtgagctatgattgcaccactgcactccagactagatgaccatctcttttaaaaaaatgtgtttatatgttatatgtgatagtgctttttaaaaacatttttaaattatagagacagggtctcactatgttacagcccaggctggtctcaaattcctgggctcaagcaatcctcccaccttagctaacctcccaaagtgctcggattataggcatgagctgcatgcccagctaatttagtgatttttaaaaactgagctggtaattataaattctcttcctggaacttctgactttctcacaattggaatcttttgacaaaaattatcagtaatgggaaaactttgtgtagttgtcatttttcctcccatcagtgtgatagatatgattggagttatgttggactgatattttgaaaaaagatttaattatagctattaataaagacatttaaactactgactatgcatttttattcttttgggagggtttaatgtttatagtttaaagcaaactgttgtttttaaaaaagtatctaacagggccgggcgcggtggctcacacctgtaatcccagcactttgggaggcctaggcgggcggatcacaaggtcaagagatcaagaccatcctggctaacatggtgaaaccctgtctctactaaaaatacaaaaaaatagctgggtgtggcggcgtgcgcctgtagtcccagctactcgggaggctgaggcaggaggatggcatgaacccgggaggcggagcttgcagtgagccgagatcgcgccactgcactccagcctgggcgacagagcaatactctgtctaaaaaaaaaaaaaaaaaaaaaaaaagagtatttagcagaggccaggtgcagtggctcatgtttgtaatcccagaactttgggaggctgaggcgggcggatcatttgaggtcaggagtttgagaccagcctggccaatgtggcaaatgtgctgtctctaactaaaaatacaaaaattagctgggtgtggtggtgcagacctgtagtcccagctacttgggaggctgaggcaggagaatcacttgaacctgggaggcagaggttgcagtgatccgagatcatgccactgcactccagcctgggttacagagtgagactcttctcaaaaaaaaaaaaaagtatttaatagtgataaatctgcagtattctcttgtagtttttaagatcatattattcagtcaaagaaaagagctcaacttgaaatatttccagagtttaaacaatcttactaagctttgatgggttgtatctattcttaacatgtgaaacttccttattacctataatatacactaacttaaatattgacaatttttttccagtggtttaacttgaattctctcttgacgggtccagaattaatatcagatacatatcttgcacttttcttggctcaattacaacaggaaggtaagtaacggctgaacattttgtaatgttacctttcgaagtagttaaataaccaggcacattagatgacagtgtgataaaactgtttttctggcagtggcagtgaaacaatctttagttttgacgtggtgataggctgtgatttgggtgacgctgttcagttagagttctcactgacacctggcccttcctcttctgaggatgctgctttctttgcagcccttctaagtaatggctttttcttttatacatcacatatcacacggctgagaggagggatagatgtttttcttctttgcctcttctaggccactgttcttccttataaactccagtttctttgaaatacatgcccctaacggctgggcacggtggctcacgcctgtaatcccagcactttgggaggctgaggcaggcggatcacgatgtcaggagatcgagaccatcctggctaacacggtgaaatcctgtctctactaaaaataacaaaaaattagccggggtgtggtggcggacgcctgtagtccgagctactcgggaggctgaggcaggagaatggcgtgaacccaggaggcggagcttgcagtgagctgagatcgcgccactgccctccagcctgggcgacagagcgagactccgtctcaaaaaaaaaaagaaaagaaaaaaaaaagaaatacatgcccctagattaaactatcccttgtccttttgcactcatccacaagtctcttttcatcagtgattttaggatctgactcgttgtctttttctctacttcaactacttttatcattcttaattatttctgtatcgtcaatcaatccagtacctgcctcttagtttcaaaatcacttactcttgcttagctattaccagtaatcataaccactgtcaaatctcaattgcaagcatattactctttaactaccacctcctatctttaaaccatgttttgtctgtttttttattccagccattctttaaaccctactgtggggcccaagcatttcctttatacgcattcttcctttcttctactgcttattttctgtaatccgtcatcataatcactccattgcattcttcaacgtgtttcccctctctccctccatcatacttgaatgacaaaaatctcaaccctggttaaaccacatcttggccttgtccattcctgtaccagagtagctggacgtggctaaaaaataacataaaacatgatgattggttttacttttttcttaaatgatctatccatccattcacccatccatctatcaaagtgactaggcctatttctgaagcccaggctggagtgcagcagcataatcacagctcattgcagctccaaactcctgggctcaagtgattctcttgccttagcctgttgagtagctgggactacaggcttgtgctaccacacctagctaaggttttactttaaatttattataatcacaaaattcagatgagcctttagtgctgtctgatatttctactatgttttcttagtgatgtaccaccctccaaggtgtttataaaaaattatgtaccactctccaagaagtttataaaaaataatgtgccaccctccaaggtgactaatttcacagcttatgtctttaaacctttaagcactttcctctcccttacacaccttccttgtggctttccgttacattctgctgagaacatagaagcaattaaaattatgttctttctaccagcaaatttatcaatttgcttatatcttcacctgtgctttgagcctatttaaatagatgaatggtcccctacctctaaccaaaaccagtccctcacttgtgggctggatcccagctcttctcacctactcaagatgttcctgctttcatctctccactctcttatataatcagttccccccccctttttttgtaatattcctataagcagtaaaataagctttttatttccattgattaaaaataaaaatcctctcttaattccatgaaactccagctgcctccccatttttattttttccttaggattgtctctagtgtgccttctccttttcttgaactctgcctcctgggttcaagcgattctcctgcctcaacctcccgagtagctgggattacaggcgtgcaccaccatgaccggctaattttttttttttttttttgagatggagtttccctcttgttgctccggctggagtgcaatggcgtgatctcggctcaccgtaacttctgcctcctgggttcaagcgattttcttgcctcagcctcccgagtagctggatttacaggcatgtgccaccatgcctggctaattttgtattttagtagagatggaaggggtttctccatgtttgttaggctggtctccaactcctgacctcaggtgagccgcccacctcggccccctaaagtgctgggattacaggcatgagccactgcgcctggccccggctaaattttttttttttttttttgtatttttagtagagacagggtttcaccatattggccaggttggtctcgaattcctggcctcgagtgatccacctgcctcagcctcccaaagtgctgggattacaggcgtgagtcaccttgcctagccatcttttagtaatggtatttggagatcacaatttgagtgctggcatgcttattgctgctgggtttgttatgtagttattgtgaattcacatttaggaatatagggtttttaattctttgattttagatacttgtatcttttttcttttatatttaaaaccttggttcctgatgatatcccttcttagaaaccctgtctacctttggccttcagcccaccatgctgtggttttcctaacttgctgcctgcacttttcagattcctttcatggatcttaaatatcatctgtaaataagatctatgtgtcaataattaccaaacttttatctttagtcttgacatctaccctgaacacctagctttgactaactcctagctttggcatctccacttggaaatccaaaaagtgtttcaaactgaacatgtctatgaaagacttatttttttctctctatccatgctatccatcaggttttccatttccataagggtgactcttgtactctggttcctatatattataccgacagagcagcccagagtgcttcttaaccagtgtaaggcctgttatgtcccaccctcactctttgtccttcagtggcttcccagcacacttagaataaaatctgaagtcttaggccgggcttggtggctcatgcctgcaatcccagcactttgggaggatgagggggcagatcacttgaggtcaggagttgatgagaccagcctggccaacatggtgaaaccctgtctctaccaaaaaatacaaaaattaactgggtgtggtgttgtgcacctgtagtcccagctactcgggaggctgagataggagaatcacttgaacccgggaggcagaggttacagcgagccaagatcataccactgcactccagcctgggtgacagaacgagactctcaaaaaaaaattaaaaaaaaaaaatatgtgaagtcttgaataaaacccaagatctttaccatggcccctgaacagggcagagtatccattcttcagacactcttcatagaataccatggtgagctggcatatttattatacaatacagaaacaattttactggcagaaaacacattaaaccgtctaaactctgaatacagttgtcctcataaaaaatgttcaacatactattttgaggttttccattaatagttcttataatctttgtcccattatgtgttaatccaacaaaggatatccaataacaaacaccaaagtttaagaaaaatgtgctaggcgcggtggctcacacctgtaatcccagcactttgggaggccgaggtgggcagatcacctgaggtcaggagttcgagaccagcccagccaacatggtgaaaccctgcctctcctaaaaatacaaacattaactgggtgtggtggtgggtgcctgtaatcccagctactcaggaggctgaggcaggagaatcgcttgaacctcctgggaggcagaggttgcagtgagctaatattgcaccactgcactccagcctgggtgacagagtgagactccatctcaaattaaaaaaaaaaaaaaattaatgatagagaaacttaaatcagttagattgttttaggtatagcccatccttggtttttgtgtgtagcatctagcttggggaaaccctggatttctggaatcatatttagacacagtcacactagactaatgtaattcttttgggatgcaaaccacacgtttgacaccttaaatagcttttaggtatttggcttcccagcccctatttttagttacaaggggtgtacatgtgtgggtcagggtgggggtagctctttccgcagatgattagttttagccatgttactagttattgcacacattatctgtgtcctcacagcagccctgtgagtaagtgtattagggttctctagagggacagaactaataaggtagatgtatatatgaagggtaatgtattaaggagtatcgactcgtatgatcacaaggtgaagtcccacaataggctctctgcaggctgaggaaccaggaagccagtccaagtcccaaaacctcaaaagtagggaagctgacagtgcagccttcagtctgtggcaaaaggcctgagagcccctggcaaaccactggtgtaagttcaagagtccaaaagatgaagaacttggagtctgatgtttgagggcaggaagcatccagcatgggagaaagatgaaggctcagcaagtctagtacttccacactcttatttctgcctgctttattctagctgagctggcagctgattagatggtgaccacccagtttgagggtgggtctacctctcccagttcactggcttaaatgttaatctcctttggcaacaccctcgcagacacacccagaaacaataatttgtagccttcaatccaatcaagttgataatattaaccatcacaggaaggtactagtatcatatgtttaacagtagaaaccaagacaaatgcagctaggaagtgggagaactgggatcagatgcaggcagtctgattctaaatcagttgctgttacccactctgacaacagtaagtgagtagcctgctcagtcaagtactatattagtagggccctttacagacatatttatttctcacagtcactcaatgagacggctcttccagtcttacaatggagaaagtgaggctcagagactttaagtaacttaccttagacgactttactagtaagtataagaatcattatttggactaaagtctttctgaatcctcagcttgtatttttttccagtgttctgtgctgcctttttatctactagtgttttacatcaattttgaatctctttactaactggttaggttgatttttgccttttttttttaggttattctatatttgtcgttaagggtgatctgccagattgcgaagctgaccaactcctgcagatgattagggtccaacagatgcatcgaccaaaacttattggagaagaattagcacaactaaaagagcaaaggtaaaaatgaggcctgcagtatggaatatatggtagtatttcattatgagaattaaattttcatgcttagattgaatatgtggtccttgtgttgttggcgactctattttggaccttatattttagtgaagtttattagtttaaacttgaatcaactctttgaaatacttaaatatattaacttagttagctggtatggtatattcctagcacttcgggaggctgaggcaggctgattgcttcaacccaggagttcgagaccagcctgggcaacatggcaaaacctcatctctacaaatagtacaaaaattagccagatgtggtggtgtatgcctatagtcccagctacttgggaggcagaggaagaaggatcacctgaaactggggaggtagagactacagtgagccataatcacactaccgcactccagcctggtcgagagagtcagaccctgtctcaaaaaaaaaaaaaaaaagaaacggaaaaaaaaaacttagttggattcaaattgcaacacaatcattatattactagagcttatttgccagaaaacattttaagttttgacttacttaaagcctttacattacaaatgcctttatgttatgtctaaaatagaagattggttgcagttattaccagtgcttttgttctttagagtccataaaacagacctggaacgagtgttagaagcaaatgatggctcaggaatgttagacgaagatgaggaggatttgcagagggctctggcactaagtcgccaagaaattgacatggaagatgaggaagcagatctccgcagggctattcagctaagtatgcaaggtaaagacattctgatgtgtgttgtattcattgctgaagaattgattccaattattcttagatttcatggaagttaatgtactcttagaggtgttttgacaattactgcagaagcaatagctatatagtgggctttccctttagatttcttataatggaaatcactttttacaacctatattttattaggagtagttatatttttactcctggttattttatttggtttcaacactgtactaacacaatagtaaattgtggttttaatctttgtgggtatcagttgacccttatccaaatcagctgttacataaatatgtgccattagacactatggaagggcctggacagggaatataaactgattttacaaaaacccaacatttattggctatgcaacttaaaccgtaagcccactttggtgggcccagttttttagtgatataaactatcaatagagaaaagcgaaaacatatcccctagacaatctaggcaaagaaaaatgttaagacatagctcaaagtagcttaattaaaagtttgaagtgggttttttgttttatttttttctaactcatatgtatttgcttctactttctaatgaaattatttatcagttgatttccttagatatctaaataaaattgaaatttcattaatgggaagattatttttatcctgaacttttcttgcctctatgcatgcctctgagtactccatatggtgtgcaatcccatttttgattaatagagtcctgctggattagcagggacagaaatcagctttagatttctttcttttttttttttctttctttttttttttttttttttttgagtcagagtctcactgtcgcccagcctggagtgcagtgatcttggctcactgcaacccctgcctccgaggttcaagcgattctcctgcctcagcctcctgagtagctgggactacaggcgcctaccaccacgcccagctaattttttgtacttttagtagagatagggttttgcccttttggccaggctggtcttgaactcctgacctcaggtgatccacctgccttggcctcccaaagtgctgggattacatgtgtgagccaccacgcccagccagaagagtagaatattcttaaagagaaaacgttttaaaggcttactcaaatgagtataaacaaacatattgttgcttgaattggtaaatacagtgattggtttttgttgtgttgtgttttgttttcaggtagttccagaaacatatctcaagatatgacacagacatcaggtacaaatcttacttcagaagagcttcggaagagacgagaagcctactttgaaaagtaaagtagttggtacaagttaaagtagcatgtttaatatttgctttggctattttgtctatttgtaaatggttactgcctgaatcctgtgaatatttgaatgtattttttaaaaatttacagcaaataggacgggcacggtggcttacgcctgtgatgctagcagtttgggaggccaaggcgggcagattgcctgaggtcaggagttcgagaccagcctgggcaacacagtgaaaccccatctctactaaaaatacaaaagaatcagctgggcatggaagcgtgcgcctgtagtcccagctgcttgggaggctgagccaggagaattgcttgaacccgggacgtggaggttgcagtgagccgagatcgcaccactgccctccagactgggtgacagagtgagactccgtctccaaaaatatatgtatatatatataaataaaaataaaaatttacggcaaataacatgaaacaaaaaaaccttgccccaatactggataaattttttaaactgagtgaaggaaaccttataaaatttcatttattaaaagaaaaatgaaattaggacaagacaagaagaatgccaattgatcctttggatgtacttcttgcttacctgattaaccctgcaaaattcctctaccaatcagtacgaaaaacagctttggaggtatgggagcgcattcccaaatagacgtggtagttcatttagctgctcatggccgcttcaggcagtcctgtaagcctgttagcatcaggggaatggatgcaaaccataaatctggatcaactcctaaaaccttaccttgtgcccagccttgtaagtgcttgctaaataggaattccaccatatgaaaatacattcttttcaagtaactatcattcagacttttgtcccccactttttttttttaaagaaaaataaaaggctgggcacggtggcttacgtctgtaatcccaccattttaggaggccaaggcaggtggatcacctgaggtcaggaattcaagaccagcctgaccaacatggtgaaacctcatctctactaaaaatacaaaaattagccgggcatggtggtgggtgcctgtaatcccagctacttgggaggctcagacaggagaatcgcttgaatctgggaggcagaagttgcagtgagctgagataacgccattgcactccagcctgggggacaagagcgagacttcgtctcaaaaaaaaagagaaagaaaacttcatgttaaagattacaagataaataatcagacccactgatcctaggtcagaaaacagagtcatagctcaatctgacttactatttgctgtatttcatccattctgagatgcacatagtttcacatttcaatgtctctgaaattgagaagcatcttacagtcataattgacagtatattagcagcacctataaatattggctcattttacatttgatggtataatgaagaaaatatttacctttttttctgttttgtttttaagtcacaactcagaagtagatgaaggaaaattctgatcagctgacatcctcttaatgtgagatatttctagtctttattcagtatagattaatggctaattatatgttaaatttcaaagtagtgcttattagtgctttttacttttaagtttcaaaattaacttttttattataataaactccaaatttatacaaaagtagaaaaactagcatactcctgtttatgacccagattcaacaaatactagcacacggccaatcttgcttttttttttttttttttttgagatggagtcttgctctgttgcccaggctggagtgcaatggcacaatttctgctcactgcaacctctgcctcctgagttcaagcgattctcccacttcagcctcccaagtagctgggattacaggtacacaccaccatgcctggctaattcttgtatttttagtagacacgggatttcaccatgtcgtccaggctggccttaaactcctgacctcaagtgatccacctgcctcggcctcccagagtgctgggattacaggcatgagccactgagcccggcccaatctcgttttataatactcccatctcccattctttccactgtcccacctgcaagtttggattattttgtaacaaatctcaatcatcatattattctataaccattttaatatgtgtctctaaaatatattagctttatttttaacatagttaaatgctattgtcataaaataataatcataataattaattgtaattctatatcatcaattatctagttaatgtaaaaaataaatctaaggccaggcgcggtggctcacacctgtaatcccagcactttgggaggctgaggtgggcagatcacctgagatcaggagttcaagaccagcctgaccaacatggagaaaccccatctctactaaaaatacaaaaaattagccaggcgtggtggcgcatgcttgtaatcccagctacttgagaggctgaggcaggagaatcacttgaacccgggaggcgaggttgcggtgagccgagatcgtgccattgcactctagcctgggcaaaaagagtgaaactccatctcaaataaataaataaataaataataaaaaataacttaaatctacttaattagaaaaactaacattctaaaaattttattttaagaaatatcaaaattggctgggcacggtggctcacgcctctaatccctgcactttggaaggctgaggtgggcggatcacctgaggtcaggagggtcaggagtacaagaccagcctggccaacatggcgaaaccctgtctccactaaaaatacaaaaattagccaggcatgatgatgggcacctgtaatcccagctactcaggaggctgagacagaagaatcgcttgaacccaggaggtagaggttgcagtgagctgagatcaccccactgcactccagcctgggtgacagagtgaaactccgcctcaaaaaaaaaaaaaagagaaaagaaatatagaaattaaagcatacatggccaggcgtagtggctcatgtctgtaatcccagcactttgggaggctgaggcaggcagatcacttgaggccatgagttcaagaccaacctggccaacatggcgaaagcctgtctctactaaaaatacaaaaaaattagttgggcatggtggtgcacacctgtaatcacagctactttggaggctgaggcaggagaatcgtttgaacccagaggtggaggttgcagtgagccgagattgtgccactgcactctatcctgggtgacagagcgagatactgtctcaaaaagaaaaaaaaaaggctgggcgcggtagttcatgcctgcaatcccagcactttgggaggccgaggcaggcagattacgaagtcaggagatggagaccatcctggctaatacagtgaaaccccgtctctactaaaaaatacacaaaaattagctgggtgtggtggcaggcacctgtagtcccagctactctggaggctgaggcaggagaatggcatgaacccgggaggtggagcttgcagtgagcagagatcacaccactgcactccagtctgggcgacagagcgaggctctgtctcaaaaaaaaaaaagaaagcatactctcacctccttcagtgactgatgttagtattttggcacattctttttctgtgacatatacacacttaccttgtaagtgttgtactcatttcctatgacagtaaatagtctttgtaacaggctgcatgatatttcataaaatgaatggatgtggcataatttatatgtgagccttttgaattctgctattataattaatattgcaatgaacaattcttatattgcctctacacctcaaatgtcttatcatttcttctagtttttctgaggatgtcagattattgggttaaaggatatgaacatttttaaggccttggaacagatttctaaattgctttccagaataattcccatgtgatactttcaccatgtttatttcagacttttttttttttttttttttgagacgaaatctcactctgtcacccaggctggagtgtagtggcatgatctcggctcactgcaacctccgcctcctgagtttaagcgattattctgcctcagcctcccaagtagctgcggttacaggcaagtgcctccatgcctggctaatttttgtgtcttttgtagacatggggtttcaccatgttgcccaggctggtttcgaactcctgagctcaggcaatctgcctacctcggcctcccaaagttctgggattacaggcgtgcaccaccgcgcccagccatcagagtcttttttgtcaaaataaaatggtctaaagacatacatcatagagaaactataatacaaaatttacaggtatatctaagaaaagaaaagtatatttaaagcataaaaataaactgctcttttacttaaaattttttaaaaactggattaaaaatatgaaacttccaacaaattgagcttttttttttttttttttcttttttgagacgaggtctcgcttttgtcacccagtctggagtgcagtggcgcgatctcggctcactgcaacctccacctccctggttcaagcaattcccctgcctcagcctcccaagtagctgggattacaggcgcatgccaccacgtcgggctaatttttttgtatttttagtagagagggggtttcaccatgttggccagactggtctcgaactcctgatctcaggcaatctgccagcctgggtctcccaacatgctgggattacaggcatgagccactgcactcggcctgaactttttatagtagtaacgataattcagtaatgtccaataatgactaagtaagttataacaagtacaatgtcagcaataactagtgctttttagtaaacagggtcaggcaaccttgtacccttttaaaaatgttcgaatatcgatatacctccttcctacttggtggaggattgattgaggaggaaagtgtgcagtgatggttaccagcttcagcctcttggcttgactttgcaaatactggtgagaatttggaaagagcttgagaatatcttacatagtcacatgttgctgagaagagttaagaactaacttcttgatgttcatttttaacaatggcttgcattcaaaaccttgtagagctcattagtaggagctaagaagctaatatttgcctttcactaaaattcctgattacttagcctaggtagttcgttgtctctctaggttctgtctttgggagcttgggtctaaggttatcaagctaactctttcttccctctcacccttcccaaattgaccctggtgctgatttgttattcatacgattttctagtttttcttttccctttttgagtatttgaagcttcatactgaatatagtaatcatagtattcatgcataaagaaaatcataaagtaattgcataaatgcataaagtaatcatagttttcatgcattaaaaaaactagttttggctgggcgctatggctcacgcttgtaatcccagcactttcggaggccaaggcaggcgaatcatctgaggtcaggagttcgagactagcctggccaacatggcgaaacctcttctctactaaaaatacaaaaaaattagccgagtatggtggcgggcgcctgtaatcctagctatttggcaggctgaggcaggagaatcacttgaacctgggaggcagaggttgcagtgagccgaggttgtgccattgcactacagcctaggcgacaagagcaagactccatctcaaaaaaaaaaaaaaaaaaaaaaaaactccctattacagattcataatttatgagtcattaaataatattttcaagccatgacattttttccagcagtagtctctaaatctgttttaccatcataaaaccccaagcaaaactctactacatcagctgtgtcactgtaaaacctgccttaactcacagaagcatgaaattaagcaatgtgtgtgaaactattttataaactgtaaagtattccatacatacatgttggcagttattaatgtcttctctaggtgtggctttgaaatggatgcagatgctttctgttacaaaaaacataagttgcaaatgttctataacaaggagagacacaaatatcttcatggacatggattgctatgagtgtttgattgcctaatacttgagccaccacttcagtgatatggtataatttatcaaacagtgttgagaaacagaaactactggggatgttttaaagaggaaaatacttaatatagaaattaggggtttacataatcttaagaaaggatgaaggtgcagctcttagccaggcctccacagtaccacaaaccaacttgcaggaagagctgtaaccactgccccagttgggacaatgggtaatgaggatattaaatttaagaacatactgctatagcaatgatccttggcatagaaagctgccaccacaattgcctagagatgggaacatgaagtctggcccccattgcaacagcagtgaagcagaattttgggactggcatctcccaaatggctttgcttgccaccagagaacaaccaaagtggagggagatggctaggcctcatttctgcctattttattttattttttgagacggagtcttgtctgtcgcccaggctggagtgcagtagtgtgatctcggctcactgcagcctccgcctcccagcttcaaacaattctcctgcctcagcctcctgagtagctgggattacaggcacccgccactgtgcccagccaattttcttatttttagtagaggtggggttttgccacgttggccaggctggtcttgaactcctgacctcaggtgatctgcccgcctcagcctcccaaagtgttgtgattacaggtatgagccaccatgcctggcccatttctcccttttttttttttttttttttttgaggtggagtctcactctgttgcccagactggagtgcagtggtgcaatcttggcgcattgcaacctctgcctcccagtttcaagcaattcttctgcttcagcctcctgagtagctgggactacaggtgtgtagcaccacacctggctaatttttgtttttgttttgttttttttgagacagagtctcactctgtcacccaggctggagtgtagtggcatgatctgggctcactacaacctccgcctcccgggttcaagcaattctcctgcctcagcctccagagtagctgggattacaggtgtgcgccaacacacctggctaatttttttgtatttttaatagagatggggtttcaccatgttggccaggctggtctcgaactcctgacctcgtgatccgcccgcctcggcctcccaaagtgctgggattacaggcatgagccaccgtgcccagacaaggtttgtatttttagtagagacagttttgccatgttggccaggctggtcttgaactcctcacctcaggtgatccgcctgccttggcctcccaaagtgctgggattacaggcgcaagccactgtgcctgacccgtttctgctttttaaagctcatgtgagcacttaatttgtaaccagaatcctacttgtaaaataatctaagacatgtagcttttagctttgtaacctctataatattgatggcacagtgggagtggatgctgagtaccacttgaacatgttccacctcagtgtcttcacagctggaaggtgtctacattgtttcaaggtggacaattgatttacttctcatttttcataaactaaaagtagaataaaggctattcctctaaaattgctatctcacctgtcactcccttgcattctcacataccttcttgagtggaggggcagagggcatggagtgatagcagatgtgccaggaattctccataactcagtccgtccctcttgtgctatgttgcagcatcaggatttgctaatgggaggatactgcccttacgtgcatcattagccatgcacactaaggtcttacacctacacacaggtcagtattctggctcagagaccaacagggagaaattgcagttctcattagttgaactttctttattgttcacagttttaaaacacaaaattgagaggaactctataaaaaatgtgccattctattaataattgttgctggtaatttaaaaatccttgttccttttcaaattcttatataccttttttttttaaacacttgatcttagccaaaagaccgagaagcaatcttttttttttttttttttttttttaacctatagcttctcactgagattgtcagctgtttgtaagttttggtttttggttttctgtgtttgtatttacatatatgaaatacagattgagtatcccttatccaaaatgcttaagactggaagtgttttagatttggggttttttaggatttgtgaatatttgcactatacttaccagttaagcattccaaatccaaaatttcaaatctgaagtgttccactgagcacctcttttgagtatcatgttggtgctcaaaaagtttctgattttggagcatttggatttctgattctcggatttaggatgcttgacctgtaatttcagatttacataaaagcagaaatagtacacagagctccttatatccttcacccagattccccaattattggcctttctgaaccatttgggaataatatgcagatatgattttccattatgtctcagttgttcagtgtatattttctaagtacaagaatatattcctacatatttacatgataaccgtcatgtttaaacattttaaaatggggatttgtattacattgtttctctttttgaaaaaattacagaggagcttaatgcaatcagtattacttaaaatctgataatgtgtgttaaatagtagttttcatttatttcatttatcaggtgttcagtgaatgcttactatgtaacagcacagttatcagcactggggaaatagatgagtaagataagatttgcactttcattagcttacatgccataaagagggaaataaagagaacaccagatgatgataagtttatgctgagaattaaaatgaagtgatgaaataatgggaatgtcaggtggctacttttggtgggatggtcaggaaaggcatctctggggagataaattttaagctcagacctgagtgaaaagaatgagccagccatggaaacattatgttaactcacatggtagtttgaaatgctttatctgatcaaaggtacttatttttggtgactttcaacaatattaagggtctataaaccaacactcatttgcataagaataactaccagtgaatctttttgtatgataggttttttgtttgttgtttttttgagacagagtctcgctctgtcgcccaggctggagtgcagtggcgcgatcttggctcactgcaacctctacctccccggttcaagtgattctcctgcctcagcctcccaaagtagctgggattacaggtgcctgccaccacgcctggctaatttttgtatttttagtagagatggggtttcaccgtgttgtccaggctcgtgtcaaacttctgacctcaagccatccacccgcctcggcctcccaaagtgctgggattacaggtgtgagccaccactcctggccatgataggttattttgtgatgaaaatacctacctcttaatttgtctgataaatttaaattttatgtctagatttcctaagatcagcacttccatattttaaagtaatctgtatcagactaactgctcttgcattcttttaataccagtgactactttgattcgtgaaacaatgtattttccttatgaatagtttttctcatggtgtatttattcttttaagttttgttttttaaatatacttcacttttgaatgtttcagacagcagcaaaagcagcaacagcagcagcagcagcagcagcagggggacctatcaggacagagttcacatccatgtgaaaggccagccaccagttcaggagcacttgggagtgatctaggtaaggcctgctcaccattcatcatgttcgctaccttcacactttatctgacatacgagctccatgtgatttttgctttacattattcttcattccctctttaatcatattaagaatcttaagtaaatttgtaatctactaaatttccctggattaaggagcagttaccaaaagaaaaaaaaaaaaaaaagctagatgtggtggctcacatctgtaatcccagcactttgggaaaccaaggcaggagaggattgctagaacatttaatgaatactttaacataataatttaaacttcacagtaatttgtacagtctccaaaaattccttagacatcatggatatttttctttttttgagatggagtcttgctctgtcacccaggctggagtgcagtgtcgcgatctcggctcactgcaagctctgcttcctgggttcatggcattctcctgcctcagcctcctgagtagctgggactacaggcgcccgccacatcgcctggctaattttttgtatttttagtagagacagggtttcaccatgttagccaggatggtctcaatctcctgacctcatgatccgcccgcctcggcctcccaaagtgctgggattacaggcgtgagccatcacgtccggccagaaatcatgaatattagtaggtgaaaaataaacacattttaccacctggaaaatgaaaaatacttgagtataatctaaataacaatgggaagtgcagagttactttccaggtctcggtttaaatatgtcttaaactttggccaattagtagtagaagttgagagaaaaagtaactatctgacaaagaaattataagcagaatatataaagaactcttaaaactgaataatcagaaaacaactcaataaaaaggtgaaggatttgaaaagatatttcaccaaataagacatagggatgacaaataagcacatgaaaagactctcagcatcactagtcacagggaaatgcacgataaaaccacagtgagacaccatggcacccctgtaggtatggctttaatgaagaaataaaactgacaataccaagtgttggcaaggatccaagcagctgagactcatatactgttaatgggaatgtaaaagtgtacagctttggaaaacagtttggcatttttttgataaatgtatacttagccatgtgatccagcagtcccaatcatgtatatataaccaaaagaaaagaaaacttaggttcacataaaaacttatatcaaatgcttatagctgaccaggcatggtggcccatgcctataatcccagcactttgggaggccgaggttggcagatacctgaagtcaagtgttcgagaccagcctggccaacatggcaaaaccctgtctctacttaaaatacaaaaattagccaggcgtgatggcaggcacctgtagtccagctattcaggaggctgaggcaggagaatcacgtgaacccgggaggcagaggttgcagtgagccgagatcgtgccactatactccagcctgggtgacagagcaaaactctgtctcaaaaaaaaaaaaaaaaaaaagggctggacacggtggcttacgcctgttatcccggcactttgggaggccaaggctgatggatcacctgaggtcaggagttcaagaccagcctggccaacatggtgaaaccccatctctactaaaaatacaaaaatttgctgggcatggtggtgggcacctgtaatcccaggaggctgaggcaggagaatcacttgaacccgggaggcggagattgcagtgagccaagattgtgccattgaactccagcctgggtgacaagaccaaaactccttctcaaaaaaaaaaaagattatagcatctttattcatcattgcccaaaattacaaactgcctaaatgtagaccttcatttagttaatgaatgcacaaactgtggtatatccaaacaattgaataaaaaaaggaatgaactggtacttttttctattcctcctgtttaagtacagccaaaacacctcaacatttgtataaaacatgagctgggctgggtgcggtggctcacacgtgtaatcccagcactttgggaggctgaggcgggtggatcacctaaggttgggagttcaagaccggtctgaccaacatggagaaaccctgtctcaactaaaaatacaagattagtcgggcatggtggcgcatgcctgtaatcccagcttcttgggaggctgaggcaggagaattgcttgatcccgggaagcgaaggttgcagtaagctgagattgcaccattgcactccagcctgggcaacaagagcaaaactctgtctcaaaaagaaaaaaaaaaccattcagctgaatctcaaaggcagagagaagacagactggctagggaccttggaaccagaggagcagtgtggtggggagtggactggattttctttttgcctcatttatcctggacttggtgctggagaagctatgggttcagaccaagagaaaaccccatgaaaagcctgctctctctagccaaaagaggcaacctagcaagataaaaacctttagataataagcacttgactccagtcaaacaaaacagaataaactggccccattcacccctgtcagcaaaggccaagtgggagccaagatatgtaccccaacctggaagtcataaggtacacttctcccctttcccagccaaggtggtgttagagaaggctgactggggagctgggattctcattccctccaggaggtgataacactcctttcacatggtgtcagtggtcacagggaggctgaacttccacccagtaatacataggcatctctctggctcctatatgggtgatgttggagaagaggccgagtagagaatccagactgttgctgacacccagcagtaacaaggacacctccacaatgtccgtggaggccatgtggagatcagtaacaaggcactgctctccctcccagtcagagagatgtcagtggaggactagggggctagaactcccatgtgcgttcagcagtaatccccatgaccgccactccttgacatcacaggccttgaagaaacctggactttcactcccctctggttgtagcgaggtggcactcccttttccctgttgccagtgctgtgtcagtggaggcttgctaaattggaagatgtaaataagattcacattctcataacataataccccaaattttcaggatttaattgaaaatcactaagctgggcatggtggctcacacctgtaatcccagcactttgggaggccaaggtgggccaaacacttaaggtcaggaattcaagaccagcctggccagcatggtgaaaccctgtctctactaaaaatacaaaaattagctgggcgtggtggcacatgcctgtaatcccagctactgggaaggctaaggcaggaaaatcactggaacctgggagacggaggttgcagtgatccaagatcgcactagtgtactgcagcctgggcaacagagcaagactccatctaaatttgtgtcaggattcccagaaggagatgagaaagggtggggctgaaaaaaattgaggaagaagtcatggctgaaaatttcccaaatttggcaaaagtcagaaacctacagattgaaaaagctgaatgaagctcaaatatgataaactcaaagaagttcacacagagacacatcacagtcagatttctgaacactgcagacaaaaaatgaagatctcgaaattagcaagaaatgaccttacctaagcaatttgaatgacagcagatttcccatcagagatcataaaggccagaaggaaggggtacatacaacattttttctagtgctgaaagacaaaaactctaggctgggcacggtggcacacacctgtaatcccagcacttttggaggctgaggcaggcagatcacctgaagtcaggagttcgagaccagcctggccaacatggggaaaccctgtctctactaaaaatacaaaaattagccaggtgtggtggcacgcacctataatcctagctacttgggaggctgaggcaggggaatcgcttgaacctgggaggcgacggttgcagtgagccaaggtcgcgccactgcactccagcctgggcagttgagcgagactccatctcaaaaaaaaaaaaattatccaggcttggtggtgggcgcctatagtcccagctacttgggaggctgaggcaagagaattggttgaacccaggaggtggaggttgcagtgagccaagctcatgccactgtactccagcctgggtgacagagcgagaccttgtctcaaaaaaaaaaaaaaaaaaaaaaaacaagaaaaaaactctaaacccagagttacatatccagtgaaatatccttcaggagtgaagggaaaattaacgatttgtcttcaggagacctaccctaaaagaatggctaaaggaatttctctaaacagaaaagaaatgataaaagaagtaattttggaacatcaggaaggaagaaagaacaataaaaagagtaaaatatgggtaaacacaatagactttcccctccttttgaattttctaaattgtatgatggttgaagcaagaattatagcactgatttggttttcagtatatatattggaaatatttaaggcattatgttacagatgaaggagggtcaaaggatataaagggaggtaacctttctatatttcttttgtactgatgcaggcactttggaaaataatttcactatttgtttaaaaactgaacataccctgaccatatgacatagcatctatactcctgggcatttatcccagagaaacagaaatttatttattttttttttagtattacactccgtaagtgctgtaatactagcacttagggaggctgaggcaagcagattgcttgagcccaggagttcaagaccagcctgggcaatgctgcacagtcaaaaaagaaaaacaaacatttagaaaactattttaaaagtctttaattgctgaatgcctctttggctaatatttggaagatcattattattatttttcttttttaggcagagtcttgctctgtcactgaggctggagtgcagtggcgccatctcggcttactgcaacctctgcctcccgggttcacgccattctcctgcctcagcctcccgagtagctgggactacaggcgtgtgccaccatgcccggctaattttttgtgtttttagtagagatggggtttcactatgttagtcaggatggtctccatctcctaacctcgtgatccgcccacctcggcttcccaaaatgctgggattacaggcgtgagccactgtgcccagcctggaagatcattatttagtcctacaactgacacattgttccactgacgcaattgcccaggctggtcttgaactcctgggctcaagcaatctgcctgcctcggcctccctaagtgctagtattacaggcttgagccactgtgcccagccaaaaatagaaatttatattctcacaaaaacatgtacatgaatgtttatagcagctttacttgtcataatcaaaaactggaaacaaccaaaatgtcctacagtgaaacaaactgtagtacatccatagcatgtaatactctactgtcaggattaaaaagaaacccactgttggcacaggcagcaccgtggctggatctcaggggcattatgctgagtgcaaaaaagcctcaaagggtcttacactgtatgattccacttgttcaactaaaaatgacagctgtatagagatagagaacatattagtggtttccactagttagagaaagtgggtaaaagataggtgggtgggaatataaatcgatagcagggagatctttgtggtattataacacttctatgtcttgattgtagtggtggtggttacatgaatacacgtgtgataaaatgccatgtagaactacatataacgttgtgccaatgtcaatatctaggttttagtttgatctttagttacataagatgtaactattgggtgaaattgggcaaaagagtacacgaaacctctcttaaatatctttacaacttcctttgaattgacagtttttcaaaatagaaagttgggtttttgtaaatacatgaattgttgatatacacaacaaatctcaaatgcattatgctacgtgaaagaagccatattcaaaaggctacatacctactgatgccttttatatgacgtgcaggaaaagataaaactgtaggacagagaatatactggtggctatctgggattaggaaatggggatcgaccacaaaggggcagcatgggggaattttctggggcaatggaatggttgtgtatcttgatggtgtatttgtcaaaatatatagaactataaaagtaaattttgctttatatgtattaaatcaaaaaaagaaactcgtgctcaaatagaaatacattttctgagaacttgccttttgatgactttgagaattttctggaaattttaaagaaatgtggttttgtttcccaacaggtgatgctatgagtgaagaagacatgcttcaggcagctgtgaccatgtctttagaaactgtcagaaatgatttgaaaacagaaggaaaaaaataatacctttaaaaaataatttagatattcatactttccaacattatcctgtgtgattacagcatagggtccactttggtaatgtgtcaaagagatgaggaaataagacttttagcggtttgcaaacaaaatgatgggaaagtggaacaatgcgtcggttgtaggactaaataatgatcttccaaatattagccaaagaggcattcagcaattaaagacatttaaaatagttttctaaatgtttctttttcttttttgagtgtgcaatatgtaacatgtctaaagttagggcatttttcttggatctttttgcagactagctaattagctctcgcctcaggctttttccatatagtttgttttctttttctgtcttgtaggtaagttggctcacatcatgtaatagtggctttcatttcttattaaccaaattaacctttcaggaaagtatctctactttcctgatgttgataatagtaatggttctagaaggatgaacagttctcccttcaactgtataccgtgtgctccagtgttttcttgtgttgttttctctgatcacaacttttctgctacctggttttcattattttcccacaattcttttgaaagatggtaatcttttctgaggtttagcgttttaagccctacgatgggatcattatttcatgactggtgcgttcctaaactctgaaatcagccttgcacaagtacttgagaataaatgagcattttttaaaatgtgtgagcatgtgctttcccagatgctttatgaatgtcttttcacttatatcaaaaccttacagctttgttgcaaccccttcttcctgcgccttattttttcctttcttctccaattgagaaaactaggagaagcatagtatgcaggcaagtctccttctgttagaagactaaacatacgtacccaccatgaatgtatgatacatgaaatttggccttcaattttaatagcagttttattttattttttctcctatgactggagctttgtgttctctttacagttgagtcatggaatgtaggtgtctgcttcacatcttttagtaggtatagcttgtcaaagatggtgatctggaacatgaaaataatttactaatgaaaatatgtttaaatttatactgtgatttgacacttgcatcatgtttagatagcttaagaacaatggaagtcacagtacttagtggatctataaataagaaagtccatagttttgataaatattctctttaattgagatgtacagagagtttcttgctgggtcaataggatagtatcattttggtgaaaaccatgtctctgaaattgatgttttagtttcagtgttccctatccctcattctccatctccttttgaagctcttttgaatgttgaattgttcataagctaaaatccaagaaatttcagctgacaacttcgaaaattataatatggtatattgccctcctggtgtgtggctgcacacattttatcagggaaagttttttgatctaggatttattgctaactaactgaaaagagaagaaaaaatatcttttatttatgattataaaatagctttttcttcgatataacagattttttaagtcattattttgtgccaatcagttttctgaagtttcccttacacaaaaggatagctttattttaaaatctaaagtttcttttaatagttaaaaatgtttcagaagaattataaaactttaaaactgcaagggatgttggagtttagtactactccctcaagatttaaaaagctaaatattttaagactgaacatttatgttaattattaccagtgtgtttgtcatattttccatggatatttgttcattacctttttccattgaaaagttacattaaacttttcatacacttgaattgatgagctacctaatataaaaatgagaaaaccaatatgcattttaaagttttaactttagagtttataaagttcatatataccctagttaaagcacttaagaaaatatggcatgtttgacttttagttcctagagagtttttgtttttgtttttgtttttttttgagacggagtcttgctatgtctcccaggctggagggcagtggcatgatctcggctcactacaacttccacctcccgggttcaagcaattctcctgcctcagcctccagagtagctgggattacaggcgcccaccaccacacccggcagatttttgtatttttggtagagacgcggtttcatcatgtttggccaggctggtctcgaactcctgacctcaggtgatccgcctgccttggcctcccaaagtgttgggattacaggcatgagccactgcgcctggccagctagagagtttttaaagcagagctgagcacacactggatgcgtttgaatgtgtttgtgtagtttgttgtgaaattgttacatttagcaggcagatccagaagcactagtgaactgtcatcttggtggggttggcttaaatttaattgactgtttagattccatttcttaattgattggccagtatgaaaagatgccagtgcaagtaaccatagtatcaaaaaagttaaaaattattcaaagctatagtttatacatcaggtactgccatttactgtaaaccacctgcaagaaagtcaggaacaactaaattcacaagaactgtcctgctaagaagtgtattaaagatttccattttgttttactaattgggaacatcttaatgtttaatatttaaactattggtatcatttttctaatgtataatttgtattactgggatcaagtatgtacagtggtgatgctagtagaagtttaagccttggaaataccactttcatattttcagatgtcatggatttaatgagtaatttatgtttttaaaattcagaatagttaatctctgatctaaaaccatcaatctatgttttttacggtaatcatgtaaatatttcagtaatataaactgtttgaaaaggctgctgcaggtaaactctatactaggatcttggccaaataatttacaattcacagaatattttatttaaggtggtgctttttttttttgtccttaaaacttgatttttcttaactttattcatgatgccaaagtaaatgaggaaaaaaactcaaaaccagttgagtatcattgcagacaaaactaccagtagtccatattgtttaatattaagttgaataaaataaattttatttcagtcagagcctaaatcacattttgattgtctgaatttttgatactatttttaaaatcatgctagtggcggctgggcgtggtagctcacgcctgtaatcccagcattttgggaggccgaagtgggtggatcacgaggtcgggagttcgagaccagcttggccaaaatggtgaaaccccatctgtactaaaaactacaaaaattagctgggcgcggtggcaggtgcctgtaatcccagctacctgggagtctgaggcaggagaattgcttgaaccctggcgacagaggatgcagtgagccaagatggtgccactgtactccagactgggcgacagagtgagactctgtctcaaaaaaaaaaaaaaaatcatgctagtgccaagagctactaaattcttaaaaccggcccattggacctgtacagataaaaaatagattcagtgcataatcaaaatatgataattttaaaatcttaagtagaaaaataaatcttgatgttttaaattcttacgaggattcaatagttaatattgatgatctcccggctgggtgcagtggctcacgcctgtaatcccagcagttctggaggctgaggtgggcgaatcacttcaggccaggagttcaagaccagtctgggcaacatggtgaaacctcgtttctactaaaaatacaaaaattagccgggcgtggttgcacacacttgtaatcccagctactcaggaggctaagaatcgcatgagcctaggaggcagaggttgcagagtgccaagggctcaccactgcattccagcctgcccaacagagtgagacactgtttctgaaaaaaaaaaatatatatatatatatatatatgtgtgtatatatatatgtatatatatatgacttcctattaaaaactttatcccagtcgggggcagtggctcacgcctgtaatcccaacactttgggaggctgaggcaggtggatcacctgaagtccggagtttgagaccagcctggccaacatggtgaaaccccatctctactaaaaatacaaaacttaagccaggtatggtggcgggcacctgtaatcccagttacttgggaggctgaggcaggagaatcgtttaaacccaggaggtggaggttgcagtgagctgagatcgtgccattgcactctagcctgggcaacaagagtaaaactccatcttaaaggtttgtttgtttttttttaatccggaaacgaagaggcgttgggccgctattttctttttctttctttctttctttctttttttttttttctgagacggagtctagctctgctgcccaggctggagtacaatgacacgatgttggctcactgcaacctccacctcctgggttcaagcgattctcctgcctcagcctcccaagtacctgggattacaggcacctgccactacacctggcgaatatttgttttttttagtagagacgggcttttaccatgttaggctggtctcaaactcctgacctcaggtgatctgcctgccttggcctcccaaagtgctgggattacaggtgcaggccaccacacccggccttgggccactgttttcaaagtgaattgtttgttgtatcgagtccttaagtatggatatatatgtgaccctaattaagaactaccagattggatcaactaatcatgtcagcaatgtaaataactttatttttcatattcaaaataaaaactttcttttatttctggcccctttataaccagcatctttttgctttaaaaaatgacctggctttgtatttttttagtcttaaacataataaaaatatttttgttctaatttgctttcatgagtgaagattattgacatcgttggtaaattctagaattttgattttgttttttaatttgaagaaaatctttgctattattattttttccaagtggtctggcattttaagaattagtgctaataacgtaacttctaaatttgtcgtaattggcatgtttaatagcatatcaaaaaacattttaagcctgtggattcatagacaaagcaatgagaaacattagtaaaatataaatggatattcctgatgcatttaggaagctctcaattgtctcttgcatagttcaaggaatgttttctgaatttttttaatgctttttttttttttgaaagaggaaaacatacatttttaaatgtgattatctaatttttacaacactgggctattaggaataactttttaaaaattactgttctgtataaatatttgaaattcaagtacagaaaatatctgaaacaaaaagcattgttgtttggccatgatacaagtgcactgtggcagtgccgcttgctcaggacccagccctgcagcccttctgtgtgtgctccctcgttaagttcatttgctgttattacacacacaggccttcctgtctggtcgttagaaaagccgggcttccaaagcactgttgaacacaggattctgttgttagtgtggatgttcaatgagttgtattttaaatatcaaagattattaaataaagataatgtttgcttttctatttccttttgaatttgtgtttattgttaattcatagctattcaaagtgtgattagagctgggcttggtggcttgcatctacagttccagctacccaggaggcagaagcaggaggattgcttgagcctaggagttcgaggctgcagtgagctatgatcctgccactgaattctagcctgggcgacaaaacaggaaaaaagtatggatggaggaccagcagcatctgtatcacctgtgagtctttcagaaatgcagagtttcaggctacactcggacctactgaatcagaacttgcactttttacaagatccccaggacactaaagtatagagtgaagcttgagaagcgctgttgtgtggattgttcttaaccagctgcagtgatgaatatgaataacgcaggccagcacagtccattgatattctattccagcttactgcctgccaaaaggtccattattactggatcctcagtcttttccaagagaagctaagaattccaaatttttatttgaaatatattttttaaatgtttgttcaactggcccagtgccagtggctcatgcctttaatcctagcactttgagaggccgaggtggaaggatcacttgaccccaggagtttgagaccagcctgggcaacataaagagaccccatctctattaaaaaaaaatagagacaatgctgccttaaaaaagtcaaataaatgtttgctcaactgatttttaatactgagggccaaacaaagcacatcaaatttttaagtgctgcttttcctcattttatccaactctggacaccagaatccaaatgtagtgattggaatccacctagactgattgaggaatatattgtcctcaaattttatgagggttgactattcattttaactttaattaggattgggcacaaattttgaaacataataacattacaggaccggggcccgatccagaccccaagagagggttcttggatcttgtgcaagaatgaattcagggcaagtccataaattgaaagctagttcattaagaaagtagaggaataaaagaatggctaccccataggtagagcagccctgagggctgctggttgccatgtccacccccgcgccccctccccccgctttgttgttgttgtttaagacagagcttcgctgtgtcatcaggctggagtgcagtggcatgatagctcactgcaacctctgcctcccgcgttcaagcaattctcctgcctcagcctcctgagtagctgggactacaggcgtgcaccaccacgcccagctaatttttgtatttttagtagagatgcggtttcaccatgttggccaggaaggtctcaatctcttgacttcgtgatccacccgccttggcctcccaaagtgctgggatgagccacctcgcctggctggttatttcttgatgatatgctaaacaaggggtggattattcatgcctgccctttttagaccatttagggtaacttcccggcattgccatggcatttgtcaactgtcatggtgccaatgggagtgtagcagtgaggaggaccagaggtcactttcatcaccattttggctttttcagccggcttctttactgcaacctgttttatcagcaaggtttttatgatctgtatcttgtgcagaccttctatctcatcctgtgacttagaatgccttaaccatctgggaatgcagcctagtaggtcttggcctcattttaccaaccccctattcaagatggagttgctctggttcaaatgcctctgatatttccctactcccttttataagaaaacccttaatcctaagggttgcagagggatgaagatccatcttctgtattcttcaggctgaataggggtgatgatattcctgcctatgagagtctcttgtattagggtagagaggagctcagtcagtcagtatggctccctatccttcctcccttccccagcccctgacaactaccattctactttgtctctatgattctaagtatctcctataagtggaatcattcagtatttgtagggtttttttgtgactagtgtatttcacttagcatgtcaaggttcatccatgttgtagcatacgtccaaattttcttctttttaaaaactgaataatattccattgtatgatatatgcacattttgcttattcatttatccatcaaagaaaaccagtagcttttttacataccggcagtaacctggttaaaaaaataagatggaaaataccaagcccgaaaatgtcaaattcttgaataccagacaggtactataatccaagctgagcagagaggaatggcccttgtctcagccctgagccacatgtcactacatgggccccaaggagctcttgtgcccagagtcctgctaaggctcgttcttcacccctctaaagtggctcaaactagcgtaggaggccaggagggagcagattctatgccacctccattgcttccgtgccttctccagatccattttttccaaaagctgtgtttgaattctgcacaggggcatctctgtctccaacactgaaaccccttttgccagacccagagaagatttaactgcctttttttttgagacagggcctcgttctgtcacctaagctggagtgcagtggcacgatcttggctcacggcaacctctgcctcctgggctcaagcaattctcctgcctcagccacccgaatagctgggattataggcgcaggccaccacatccagctaagttttgtatttttagtagagacgcagttttgccatgttgcccaggctggtctagaacttctgagctcaggtgatccacccgcctcggcctcccaaagttctgggatgacaggcatgagccacctaacctggccagatttaactgctttgagccaccgtctcacacatcttccaggagcttctagtcaaatgcagaggattaatagtgtataattccatttacataagatctttggaatagtcaaactcatagagacagaaagtagaatggtggttgccgggggatggttgaggggaaaattaggagttgtttaacgagtatggagtttcagtttgggaagatgaaaaaagttctggagatggacagttgtaatggctgcacaacaacgtgaatgtacttaatgccggtgaaccgtataaccatttaacaactgaaaatggttacaaaattttgtgttatatatatcttatcacaataaaaaatatagaggattgatcactatatttgctcccttccaaaatctcacctaggttaaagtaaagaaaaatatataaacccacaagaacacagggaccaggagaggagatgcattcattggattacgtttggttgtaaaaaaaacaaaaaatcctccccggcacggtggctcacaccttgtaatcccagcactttgggaggctgaggcaggcggatcacgaggtcacgagtttgagaccagcctgaccaacatggtgaaacctcatctctactaaaaatacaaaaattagccgggtgtggtggcgtacgcctgtaatcccagctactgaagtggctgagacaggagaattgcttgaacccgggaggcggaggttgcagtgagccgagatcacgccactgcactccagattaggtgacagaacaagactccatctcaaacaaaaacaaaaacaaaaacaaactaatataacagtgactttacatgctatgggttttttttctcctctcatcttcaagaaatgtggagactgccagtccggggatgatacagcatcacagtgtcaggaatctgctctttctgtataattgttacaggaaaggggtccggatccagaccccaagagagggttcttgaattcagggcaagtccacagtgcaaagtgaaagcaagtttactaagaaagtaaaggaataaaaaaatcgctactccatagacagagcagccctgagggctgctggttgcccatttttatggttatttcttgatgatatgctaaacaaggggtggattattcatgcctcccctttttagaccatatagggtaacttcctgatgttgccatggcatttgcaaactgtcatggtgctggtgggggcgtagcaccaaggaggaccagaggtcactcttgtggcctttgtggttttggtgggttttggccagctcctttactgcaacctgttttatcggcaaggactttatgacctgtattttgtgttgaccttgtatctcatcctgtgacttagaatgccttaaccatctgggaatgcagcccagtaggtttcagcctcattttacccagctcctattcaagatggagttgcagccgggcacggtggttcatgcctgtaatcccagcactttgggaggttgaggcgggtggatcacaaggtcaagagttcaagaccagcctggccaacatggcaaaaccccatctctactaaaaatacaaaaattagccaggcgtggttggtgtgcgcctattatgccagctacttgggaggctgatgcaggagaatcacttggatctgggaggcggaggttgcagtaagcagatatcgcgccatgcactccagcctggatgacagagcaagactccgtctcgggggaaaaaaaaaccaaaatggagttgctctggtttacaggcctctgacataatggctttatgtacatggcttccatggctagggtcagctcatagatctaatatggctgtgttggtgctcatgttgcagcccagcaatcagaaagagaaaggaggctgggtttggtggcttacacctgtcatcccagcatttcgggaggccaaggcgggaggatcacatgagcccatgagtttgagaccagcttgagcaacacagggagacctcatctctacaagaaataaaaataaattagttgggtatggtggcatgcacctgtggtcccagctattcgggaggctgaggtgagaggataccttgagcctggaggtttgaggctgcagtgagctatgatcgcaccactgcactccagcctgggcaacagagtgagaccccatctcaaataattaaaaaaaaaaaaaagaaagaaagaaaaaaaaaaggagagcagaaaaaggctatgtaccttttctttcgggttaccttctcaaagttgtgcatactacttccgtttacattacattggccagaacttaacatgacaactactagctacaaggtggtttttattctgggttgccatgcatcttagcttaagtaccctacaggtcctgagataatgattcctatgaaaatgattatttacttatttaattaatttattttgagatggagtctcactctgtcacccaggctggagatcagtggcgtgatctcggctcactgcaacctctgcctcccaggttcaagcaattctcctgcttcagtctcccgagtagctgggactacaggcatgcgccaccatgcccagcttttttgtatttttagtagagacggggtttcactatgttggccaggctgatctcgaactcctgacctcaggtgatctgcctgcctcggcctcccaaagtgctgggattacaggcgtgagccactgtgcctggctgaaaatgattttttaaaagtgttccaggaggaaatggaaagggcataggggagtaagaaagtggaaataggaaaagaaggaagccaagcaagaggagcctatcaagcaaagcctcagtcctgcagacagtctggaggcaggatattcacatcttagagttgtccaaaacagaacaggcaagctgcataattttcaactctggctgaataaggttgcatttcagctctctgggcacctggaaagtatgggctccagtaacctggaggcagtctgctgactgctggctggtgtgcacaaaagtggtaaagggatgagggagtgcaatatgggcactggcatcttggctgtcatgcatccaggtaaaaagtggaggctcaattactatatatgaaggggagaacagactttggggaacaattagcagtcatttccaggtgagacaacaacagaagagaaatgctaatttttttttttttctttgagatggagtttcgctcttgttgcccaggctggagtgcaatggcgctatatccagctcaccgcaacctccgcctcctgggttcaagtgattctcctgcctcagcctcccgagcagctgagattacaggccaccacacccagctaattttgtatttttagtagagacggggtttctccatgttggtcagggtggtctcaaactcccaacctcaggtgatccgcccgcctcagcctcccaaagtgctgggattacaggcgtgaaccaccgcacccggcgagagatgcgaacattttttttgttttttggaggatgacaagttgatgcaggaatgagcagaaccaggaggctgaatactgagtgttaaagagttcctagcaatatgcaggaaaggaaagcaacaagtatcctgagaggtgggggttagatgtagactgaaatcaggaggtgtggttaaaactctttgaaagaggctgggtgcggtggctcacataatcccagcactttgggaggccaaggcgggtgcatcatgaggtcaggagttcgagaccagcctgaccaacatgtgaaaccccgtctctactaaaaatacaaaaattagccgggcatggtggcgcatgcctgtaatcccagctactaaggaggctaaggcaggagaaccgcttgaacctgggaggcgaaggttgcagtgagccgagatcatgccattggactccagcccaggcgacagagagagatcccatctcaaaaaaaaaaaaaaaaaaaaaaaaaaagaaaggaaaagaagaaaagaaaaaagaaacagcagattccctagagaggagacattcatcactaaaaaaaaaaaaaaaaattaaaataaatcgcagaagtaaaagccctttttgaaagggctcagggtacccagcttaatgtatgaaacaaaagcaaacccacatcaaagcacaccattattaatttcagagcatcagaaataaagagaagatctgacaagcttcttggaagaaaacaaggcatagagaataatcagagtagagtagagcaggaaaacagagtcctgggtagagcgaactgagcctagccaatcgatagaattcttgatgttttgttgaaaacagaagcactttacaattctcttggtaagttttagaaagattctgtagtaatggaaaattgtacaaatttaaaaaatggaatctgttaacttcaggaagaacaaaaggtagaaaaatcaaggcaatataatcttggtacaacatttgacttagctgcaatgaataagacttacatagtcatagaaggtaaacactgattacttactttaccaaaaattatgatatcatcatattgaaagcccagaaggaagggaaataaagggaaatacaagagtgctaaatcttttatttttcaataagttggtaatgtctaaaattaataagaaaatggcaaccataagcctaatgcttagaaattcagaaaagtatcagactaaattttaaagtctactttaaactgagtctttgctttatagttgcataaataaattcattttgatggttttctcagaacagatgaactggctgggtgcggtggttcatgcctgtaatcttagcactttgggaggccaaggccgatggctcacttcaagtcaggagtttgagaccagccaaaaaattagccgggtgtggtggtgcacgtttgtaataccagctactcaggaggctgaggcaggagaatcgcttgaacctgggaggcggaggttgcagtgagccaagatggaacgactgcactccagcctgggtgacacagtgagactccgtctcaaaaaaacacaaagaacagatgaactgttttcctttgaggaatattgatgatcccactgcttgagtaatggaaaccagcttgcagctgatagttattttttgtcttttttcctgttctatccactgtcctaggtttggaatttcagctgggcagcttcgatcccaccacctgtagccactgaggttcacaggctctgtttgaggtgttgtgttagattgtgctgggttggttttgctgcttattgagtgatgaagagcaacatattagctactgagatattttgcagaaaaaggaagagatgtcttcagctcaaatgctatcaaacttgtatgtcttttaactttttattataaaaaatttcaaacatatgcaaaagcaaaagactagtttaatgaaccttatgtacccaccacccagtttcaacaattatcagttcctgacaattcttgtttcacctatcccacctctattatacacacatacaaacacacagacaccacacacacacacacacacacacacacgagagcaaagtcaacttccattattttgaagcacatccaagacatcacatcacattatttatcacattatttattaagtttcttcagtcacagtccatctcacagaaagaaatcccccatgagaaacttttaggacatagcttttatgttaattacttaatttctgcactagccatccttgcctgccttctaattttctgcactagctatccttaccttccttctaattttctaacctgccaaggattctgctgcctcaaggtatttgtttctttctgcctggattgctctttcgcagatacttacatgtctcattctttttcacccaggtgaaataaacagcgttgttgctcacacaaagcctgtttggtagtctcttcacatggacgcgtgtgacatttggtgctgaagacccgggacaggaggactccttcaggagacgggtcccctgtccttgccctcactccgtgaggagatccacctacgacctcgggtcctcagaccaaccagcccaaggaacatctcatgaatttcaaatcgggtaagcggtcttttccatcctctcttgctacccttcaatctccctctctcgctacccttcaatctccctgtccttccaattccagttctttttcctctctagtagagacaaaggagacacattttatccgtggacccaaaattccggcgctggtcacggactcaagaagacagtcttctcttggtgtttaatcactgcagggacgactgcctgattattcacccacactccattggtgtctgatcaccgtgggggtgcctgtcttggtcattcacccacattcccttggtggcaagtcaattgcggggacgcctgctttggctgctcacccacccccttctccgtgtctctacctttctctttaaacttacttccttcactatgggcaacattccgtcctccattcccccttctactcccttagcctgtgttctcaagaacttaaaacctcttcaactcacacctgacctaaaacctaaaagccttattttcttctgcaataccgcttggccccaatacaaactcaacagtagttccaagtggccagagaatagcactttggatttgtctgtcctacaggatctagataatttttgttgaaaaatgggcaaatggtctgaggtgcctcagatccaggcattcttttacacactggtccctccctagtctctgctcccagtgcgactcatcccaaatctttcttctttctctcctgtctgttccttcagtctccaccccaagctccgagtcctttgaatcctccttttctatggactcatctgacctctcccctcttccccaggctgctcctcaccaggctgagccaggtcccaattcttcctcagcctccggtcccccaccctataatccttttatcaccccctcctcacaccgtgtctggcttacagtttctttctgtgactagccctcccctacctgcccaacaatttcttcttaaagaggtggctggagctgaaggcatagccaagggtaatgctcctttttctttatctgacctctcccaaatcagttagcgtttaggctctttttcatcaaatataaaaactcaacccagttcatggcctgtttggcaacaacccttggacactttaccgccctagacccagaatggccagaaggccgtcttattctcaacatgcattttattacccaacccactcccgacattagaaaaagctccaaaaattagattccggccctcaaaccccacaacaggacttaattaacatcaccttcaaggtgtacaataatagagtagaggcagccaagtagtaacgtatttctgagttgcaattccttgcctccactgtgagacaaaccccagccacatctccagcacacaagaccttccaaatgcctgaactgcagcggccaggcattcctccaggactgcctaccccaggatcttgcttcaagtgccggaaatctggccactgggccaaggaatgcccccagcccaggattcctcctaagccatgtcccatctgtgcaggaccccactggaaatcggactgtccaacccggcagccactcccagggcccctagaactctggccaaaggctctctgactgactccttcccagatcttctcagcttagcagctgaagactgatgctgcctgatcgccttggaagccccctggaccattacggatgctgagctttggataactcttacagtagagggtaggtccatcccctgtttaatcgatatgggagctacccactccacattaccttcttttcaagggcctgtttcctttgcccctataactgttgtgggtattgatggccaggattctaaaccccttaaaactcccccactctggcaccaacttggacaacattcttttatgtactcttttttagttatccccacctgcccagttcccttattaggccaagacattttaaccaaattatctgcttccctgattattcctggactacagccacatctcattgccacccttcttcccaacccaaagcctccttcgcctcttcctctcgtatcccccaaccttaacccacaagtatgggacacctccactccctccctggcaaccgatcaaacacccattactatcccattaaaacctaatcacccttacctggctcaatgccactattccatcccacaactggctttaagaggactgaagcctgttatcactcgcctgctacagcatgggcttctaaaacctataaactcttcttacaattctcccattttacctgttcaaaaaccggacaagtcttacaggttacctcaggatctggatcttatcaaccaaattgttttgcctatccaccctgtggtgcccaacccatacacttgtttgtcctcaataccttcctccacaactcactattccgttcttgatctcacagatgcttttttcactattccctacaccactcatcccagcctcttttgcttttacctggactgaccctgacacccatcagtcccagcagcttacctgggctgtactgccgcaaggcttcagggacagccctcattacttcagccaagctctttctcatgatatactttctttccatcccttcgcttctcaccttattcaatatattgatgaccttctactttgtagcccctcctttgaatcttctcaacaagatacttttcaacatttattctccaagggatatcggatgtccccctccaaagctcaaatttcttctccatccgttacctacctcagtataattcttcataaaaacacatgtgctctccctgctgatcatgtctgactgatctctcaaaccccaacaccttctacaaaacaacaactcctttccttcctgggcatggttggatacctttgcctttggatacctggttttgccatcctaacaaaaccattatataaactcacaaaagcaaacctagctgacctcataaatcctaaatcctttccccactcccctttccattccttaaaaaacagccctaaaagctgctcccacactagctctccctaactcatcccaacccttttttcattacacacagctgaaatgcagggctgtgcagttggaattcttacacaagagccaggaccatgccctgtagcctttctgtccaaacaacttgaccttactgttttaggctagcccccacattattcctgataccacacctgacccccatgactgtatctctctaatccacctggcattcactccatttccccatacttccttctttcctattcctcaccctgatcacacttggtttattgatggcagttccacctggcctaatcgccattcaccagcaaaggtgggctatgctatagtagtatcttccacatctatccttgaagctaccgctctgcccccctccactacctctcagcaagctgaactcattgccttaactcgagccctcgctcttgcaaaaggactacatgtcaatatttatactgactctaaatatgccttccatatcctgcaccacaatgctgttatatgggcagaaagaggtttcctcagtacgcaaaggtcctccatcattattgcctccttaataaaaactcttctcaaggccgctttacttccaaaggaagctggagtcattcactgcaagggccatcaaaaggcatcagatcccatcgctcagggcaatgcttatgctgataaggtagctaaagaagctgctagctttctaacttctgtccctcacggccagtttttcttcttctcatcagtcactcccacctattcaccgactgaaacttccacctatcaatctcttctcacacaaggcaaatggttcttagaccaaggaaaatatctccttccagcctcacaggcccattctattctgttgtcatttcataacctcttccatgtaggttacaagccactagcccacctcttagaacctctcatttcctttccatcatggaaatctatcctcaaggaaatcacttctcagtgttccatctgctattctactacccctcagggattattcaggccccctccctaccctatacatcaagttcagggatttgcccccacccaggactagcaaattgactctattcacatgccctgagttaggaaactaaaatacctcttggtctgggaagacactttcactggatgggtagaggcctttcccacagggtctgagaaggccaccacagtcatttcttcccttctgtcagaaataatttctcggtttggccttcccacctttatacagtccgataacggactggcctttactagtcaaatcacccaagcagtttctcaggctcttggtattcagtggaaccttcataccccttaccgtcctcaatcttcaggaaaggtagaacggactaatggtcttttaaagacatctcaccaagctcagcctccaacttaaaaaggactggacagtatttttacctcttgcccttcacagaattagagcccgtcctcgagaagctacagggtacagtccatttgaacttttatatggacgcactttcttgctcagccccaacctcgttccagacaccagccctctaggcgactatcttccagtcctctggcaggctagacaggaaatccaccaggctgctaatcttctcttgtctactccagattcccaactatatgaagacaccctagctggacgatcagttcttattaagaacctgacccctcaaactctacaacctcgatggactggaccctacttagtcatctatagtaccccaactgccgtccgcctgcaggatcctccccactgggttcaccgttccagaataaagctgtgcccatcggacaaccagcctaatctctcttcttcctcctggaagtcacaagtactccccactacttcccttaaagtcactctcatttctgaagaacagtaataacccttatgagcctaatacatcccttcattctattagctctattcatccttaccctactttttgcaacagggctttacacagtcaccccccctacttggactgaaccccaaaaacttgtcatccctactatcttctgtttactcatactcccattcactattctcaactactcataaatgccctaa

SEQ ID NO: 2 - DNA, 62956 bp, mfascicularis
agaatgtaatgatggctttttcttactaaattttcagtggaggaggaggagaaagaaagtaaatagttatatgaacacagtagaaagtacaaagtggaaaacaaaaagagtatcgaacccaggtgagtggtccaaacctccccccagaaacctaagaacccatagaaatgggtgggaagcggagaagatcctccagacagcaggtggcgatgtagcatcccccagaaggccctctaacagaaactaggaggacgcgctaccaaggtcacgtgtccccggcgttcactcgctcttcgcttcacgtgactcgcatcctcgcgggtgattggcctgcgtgcggcacgtgggcggggggaccagggcggggcggggtgggcggaggggagggacagggggcggagctggagggggtggttcggtgtgggggccgttggctccagacaaataaacatggagtccatcttccacgagaaagtgagtgtccgcgtgcggtggggagctgtctgccgcgcggtggcgggcgtggagcgcggcatcacagcctcccggagggctgggtggggtccgagtcgcccccatgccgatctcgccgggctaggggcgacgccgcaaccccccgcctcttcggctcggggaggggagcatcacctacgctcctacttcccccgcggcccccgccctgggagccgggagggagtatgggcggggccgggggcgtctcgggacacgggagcgcggtggcgcccagtggatttgcttcttcctttctaagtcactttccatagcttttcggaggattccttcacccctccccaatctttccctctccctagggtctagctacagtcacctctgggacacctccctcgacccctcctaccctactcctggcagaattaacttttctttctccagactgctcaattctatattggagtcttccctacatttagatctttgaggtcttgttcatgttttttcccctgcaccaggtccgcgagcctcccgagggaggagaccttggctcgcccactgtagggcctgacacttaggaagtgaagtaggaaacccgttgtgcccctaaacagggaagtcgtcacgagtttttattacgggatgtttgggtttggtttcttttggtactctcatctttccggagcaggcagccagctttgtttttaggtattaggagtggactggaatgattttgttgtggtctgcctagcctgctgtcactttaactcttcagtgaccatgcacttgaagatactgtttgtgacatgtggagaaactcctcgtttctcacatgctattatccatccatttgtatgtgagtgaagccttccccaggacaactttggcacatgatatcttgtttcataatagtatcatgtttggaaagagttgctggtaaggctattatttaataggaggagcaaagggtttttgttttattaaatgcttataaatgatcgtttatcccagacatttaaaattcacacacacagccgggcgcggtggctcacgcctgtaatcccagcactttgggaggccgaggcgggcggatcacaaggtcaggagatcgagaccatggtgaaaccccgtctctactaaaaaaaatacaaaaaatgagccgggcgcggtggcgggcgcctgtagttccagctactcgggaggctgaggcaggagaatggcgtgaacccgggaggcggagcttgcagtgagccaggatagcgccactgcactccagcttgggcgacagagcgagactccgtctcaaaaaaaataaaataaaataaaataaaataaaattcacacacacacaacaaataaagcaaagacaaaagaatacatttaccagatgtaaatctgtagtataaatcttttttttaatttttattttaaagatggcatctcattctgtcacccaggcaggtgtgcagtggagagatcatggctcactgcagccttgactccctaggcacaagcgatcctccctcctccgcctccagagtagctgggactacaggtgtatatcgccagggccagctaatgtttttggagagacaggggtctcgctgtgttgcccaggctggtctagaactcctggactcaggtgattctcccacctcagcctctcgaagtgctgtgattacaggcgtgagccactgtgcctggaacaaattgttaagtacaatgcttttcattgtagaaaacatctcggaaacttttgaaataggcagatttacagtgggggaggaaggcctcagtcgtatagttgtcactgattttttgacttgattgacatgatttataaatcatagacaatagagatttagttgcttggctgagtaaagtgtgtgaaaaatacacatgtactttcttaaaaacattttttttttgagatcgagttttgctcttgtcacccaggctagagtgcaatggcgcgatcctggctcactgcaacctctgcctccctgttcaagctattctcctgcctcagtctccctagtagctgagattacaggtgcccaccaccacgcccagctaatttttgtatttttagtagagacagggtttcaccctgttggccaggctggtctccaactcctgacctcaggcgatccactcgcctcggcctcccaaagtgccgggattacaggcgtgagccactgcacccggccatatttttgttattaattttcaaaggctttggtgtgggaccagatttcaacatggaaggccttaaacatgttccacactacttcctgagaatcagacaagatttttaacaatattgattgttacctagttgggacgcatttctactgaaccatgggatcaataaaagctgggtgctagccttgcgaaaatctacttacccgaaagaagtccctcttagtccgggtgcggtggctcacaccagcgctttgggaggcccaggtgggtggatcacaaggtcaggagtttgagaccagcctggccaacatggtgaaaccacgtctctactaaaaatacaaaaaattagccaggtgtggtggcaggtgcctgtaatcccaggtactcaggaggctgaggcaggagaatagcttgaacccaagaggcagaggttgcagtgagctgagactgcaccacttcactccagcctgggcaacaaagcgagactctgtctaaaaaaagaaaagaaaagaaaaaaaaaagagtccctctgaattatcagcatgtgtataggcctacagatacttcaggaatgtatttaccattatcattaacttgtatgtacatagcaagtgaagattcaacaatttagttttttgggcatactcaagagtatgcacctataaccatatggcccattgttaatctcctatacagtccattctaggaatgtttgggcttactgtgccatttttcagttcaccgccttcccctctgcaatatacctttaacccttgctaggtgctgggtttggagagccagagaaccaactttggccctagagaagctgggtaggtgggaatatctgcctacaaagggccttgcaaccacttcctcttggaaccttggtttcctctttctgagttgtcactttgagtaccctttattaagttagaatgtaaaaacagtttcgcactgatacatctacagtgcctgagatagggcctggcacagagtaagtactcaataaatatttgaatggggctgagcgtagtgagacctgtctctacaaagaatgaacaaaattagcccgggtgtgttagcacacgcctgtagtcatagctacttgggaggctgaggtgggaggattgcatgagtctgggaggtcgaggctgtagtgagccaaggtcacaccactgcactccagcctgggggacagagcaagatcctgtcccaaaagaaaaaaatgtatatatttgaatggataaagagaggtctttgagtttctgagatatatatggtgctgtttatctaaagtaaacaacttttctgtaaacattttaaggctttgcaggccagctgtagtctctgtcacacattcttatgtgtgcatgtttttcccaaccatctaaaattgtaaagtgcattcttagctaccagggcaggttaaatttggcccatgggctagagtttgccaacccctaacttaaacttttgtactaactttatgaccactaactactggatttttgttgtttgttttagttctggtgcctgctttctgtcttttttttttttaaatcacttctctttctgatgtttcttggtgcagtcactgtgccatttgtattggtgattttaatgtaatgcaaactgggaataataactaaacttgctgggattgtacataaagttattgaaaagatgctgagtattgactctgtggcattcattatgcccttttgtggttgctggattttagctgtctttaggatatttgagctttaggagaagccaaattctgtataaatgacttgaagtgctaatggcacagattttgaaacctctgcctgggtttgagtctcagctctgccttttactacttgtgtgatcctgagcaagttacttaggatccctgtcctctggtttcctcctgtgtagtggtggggataataacatagacataacctcagagttagagtgtagagaaggctccctggcagatagtgctgtagaagtactggccattgccattactcagatgcttgtgtttgctgatcctcatagtaaggcctcggagagcactaagaggaggtgagaatgctgctagattgacagcttgtccccagatagcccattcctgagagcatcttagctttatacctgatttgtgttgtagttagtagtgtctgtggtaattttaactagtttcaggttggtcttgaaaacctggaaaggttgggggtaaatgatttggtagcagttcccttgtgattttataaattatctttgtagaactgcagtgtgctaattctctgagcccaacacaatgaagtctgggcctaaaatcataggatttcttttattttttaaaatttttaattcatttcatgtcttttcttttcttctttttttttttttttttttgaggcggagtcttgctctgtcaccaggctggagtgcagtggcgtgaagtcagctcactgcaacctccgtctcctgggtttaagcgattctcctctcagcctcccgagtagctgggtctataggtgtgtgccaccatacccagctgatttttgtatttttagtagagacaaggtttctccatgttggccaggattgtctcgatctcttgacctcgtgatccacctgccttagcctcccaaagtgctgggattataagcgtgagctaccatgcccggcctattttttatttttttgaggcggagtgtcgctctgtcacccaggctggagtgcagtggtgcaatctcagctcactgcagcctctgcctcctgggttcaggtgattctcctaccttagcctcccgagtacctgggactacaggcgcctgccatcacacatggctaatttttgtatttttagaagagacagggtttcaccatgttggccaggcgggtctagaactcctgatctcaagtgacctacctgcctcggcctcccgaagtgctgggattacgggcatgagccaccattcccagccaaatcatgagatttcaatactgctgaactttgattatggcaaagtgaactactgctttgattaaagcttgatgagagaggtggctggggatagtttgagataagggcaaggcaggaaaatgcataatcttaggtgggctcattgtcattgtacaattcttttggtctgtgtggcatttgatctgtcctatgacttaagttacgtttatttttatttttatttttatttattttatttctttttgagagacatggtgttgctctgtcacccaggccagaatacagtggcacaatcatagctccatgtagccttgaactcctgggctcaagtgatcctcccactcagcctctcaaacagttgagattacggtatgaaccactgtgcctagccttaagtcatttttaaatttgtactgaacagtttgtcctttccttccattaaatcatattagaagtacagaacttgatatttcctgtagcaatacagtgtatctttgatgaagtttgatttcaaatacttatttttcataatttaaagctattttttatagagataattttaatcaaatatttggatgtcgctattgctatatgtgatattaagtatggtgaccatagtttgtaaactccaaactgacagcaggacaggaaatttgtgttagcaaaggcttttttcttactgtttgaattttttaaaaattaggtaccatacagagaggagcacacaaatcgttaagagtacggctcagtgaattctcacaaaatgaacatgtgtaaacagcaagtaacagaagatttacctgcatcctataacctcccattattcccttttctaggtactctctctccactgcactcccaacaaaaataacccctatgctgaattctgatatcataaatgagttttgcctagttttgagcttttgtgactggaatcgtacagtgtgtatacccttttgactctgtcctctttagtttaccattgtttgagagatttatccatactgttccaggtcgttgtagttaattcattcacattgttatgtagtattcctttgtgagtaaacacaatttccattctgctgtgatcccagctatccatttgggtcgtttccagtttagggaccattacaaatagtaatgctatctgtaatgctattttgtgttactacaaatagtaatgctatttgtagcacaaaaatagtgcttttgtgaacattctttttttttttttttttgagacggagtctcgctctgtcacccaggctggagtgcagtggccggatttcagctcactgcaagctccgcctcccgggttcaccccattctcctgcctcagcctccggagtagctgggactacaggcgcccgccacctcgcccggctagttttttgtattttttagtagagacggggtttcaccgtgttagccaggatggtctcgatctcctgacctcgtgatctgcccatctcggcctcccaaaatgctgggattacaggcttgagccaccgcgcccggccctacattcttatacatatcttttgatgaatatatgtttgcatttctgttgtttacattatgtacctactaatggaattgctagatcataggagatgtacatgttaagctttagtagatgcattacataattattagttattattggttataccaatttactctctcaccagtagtatacaacagtttctatatctctgatctccaatattttagccattttagagtttgtgtaataacacattgtggttttaatttacatttccctgatgactaatgaagttgagtaccttttttgtgttctttatagctatttgactgtcttgtgaagtgcttgtttgtcttgccttttcttttctttctcccctcccctcccctcccctctttttgagacaggttcttgccctgtcatccaggctggagtgcagtggtgcaatatcagcttactatagcctcaacctttttggggctcaggttatcctcctatctcagcctcccaagaagctggactacaagcacacaccaccatgctcagttaattttttaatttttgtagaaatggggtttcaccatgttgcccaggctggtctcaaacttctggactcaagtaatcctcctgccttggcctcccaaaatgctgggattacaggcatgagccaccgcagccagccttggctgtttttcaataggttataagtagaacatctgtatatcccttcaatttgcatatcattcagtaagagttgcactctggtagtagaaatatagaagaaagagaaagaagtggaaacaaaaagtctattttcatgagaagacttgggggctagtgttctctctggctccaagctacttattccttaccaaaagatgaggataaacttatctcagactcaggctgtctcaatgctgtcttcctattccattatacacatataacccatatttttttcaccagctgaattttgttcctagaaaattgatttatcaggaaaaaattccgtcttgcaaggtggttctctttagagtctactgtgtaacatagctcaggacaaattgtgtgatgtcagataagttgggttaaggaatagaccttattggggaaagagagaacttggagggccaaggttagcaggagaaggaaatgttctctcatctgctatcatttcaggaaggggcaaacctggtgtctgtgttcacagggagggatccatctatacgtgattctcccttcttaccaggtagcatgggaaagctactgctgtggggaggaggattacacacaggttactcggtaccaggcaccctggacttggattcaggctgccagttgtgtgagaaactgcccagcacttgaaggttctgaacccgtgggaggttgtacctacctcccataaggaggaagcctgtcgtcccgtgggagctgagcttgggtgcagtccctcttgctggcttgtccaggagtgagctccagggttgtttgggacagttctgctcattgcattacgctgcgtgtacattatctgtagagttccatgaagagaacttcagctctgtaactgcaagttttaacatggaacagaatttttctcacctgtattgattcttaagatttgaaattctgtcaacaagcatttaaattgtgtggagtgttttttttttttttttttttttttttttttttgagacagaaggctggagtggcagtggcatagtcttggctcactgcagtctgtacttcccaggttcaagcgatgctcatgccttggagtcccgattagctaggtgtacgggtgcacaccatcacactggctaatttttgtatttttagtagagacggggtttcgccatattggtcaggctcatctcgaactcctggcctcaagcaatccacccgccttgacctcccaaactgctgggattacaggtgtgagccaccatgcttgaccggcattatgttaaaagaataaatgttctaggcagctaggcacagtggcatgtttctgtagtcctagctgctcgggaggctgaggtaagaagatcccttgggccctggagttcaagtccagcctgggcaacatagtcagatctcattttttaaataaataaataactgttctagagactaaaatttcctttcaccattagtaatttactgtggaatctccaagaatgaacttattttaggtagtgaaaatgagggagactaaatgttttatacagtggtttttagtaaagtatgagatttgatgcatttgatagatgataatgtttttttgttttttgttttttgttttttttttgagacagagtcttgctctgttgcccaggctggagtgcagtggtgtgatcttggctcactgcaggctccgcctcctgggttcatgctattctcctgcctcagcctcccgagtagctgggactacaggtgcccgccaccacgcccggctaattttttgtattttttagtagagatggggtttcaccgtgttagccacgatggtcttgatctcctgacctcgtgatctgcctacctcggcctcccagagtgctgggattacaggtgtgggccactgcacccgaccgataatgtttgtttaaaataattcttaaatttttgatcatgtaatgtagtttcattaatagtagatttgtaaaataaatgttaacaaatgaaaatgcatgtacctatgttaattatacttatctaaagctgaaagttcagttcaactatgttaaaaaatagttggagccgggcacggtgactcacacctgtaatccgagcacttggagaggcctaggcgggtggatcacaaggtcaggagatcgagagcatcctggctaacacggtgaaaccccatcactactaaaaatacaaaaaattagccgtacgtggtggcggcgcctgtagtcccagctactcgggacgctgaggcagtagaatggcgtgaacccgggaggcagagcttgcagtaagctgagattgtgccactgcactccagcctgggtgacagagcaagactccgtctcaaaaaaaaaaaaaaaaaaaaagagttgcccaggcgcggtggctcacacctgtaatcccagcactttgggagactgaggcaggcggatcacaagatcaggagttcgagaccatcctggctaacatagtgaaaccctgtatctactaaaaatacaaaaattagccgggcatggtggtgcatgcctgtagtcccagctactcgggaggctgaggcaggagaattgcttgaacccaggaggcagaggttgtggtgagccgagagtgctccactgtactccagcctggacaacagagcaagactgtgtctcaaaaaagaaagaaaagttaatgattaaattatttaggggaaaatactgtgcaattctgtttaataagtcacattttaattttttcttttggaaatattagcaagaaggctcactttgtgctcaacattgcctgaataatttattgcaaggagaatattttagccctgtggaattatcctcaattgcacatcagctggatgaggaggagaggatgagaatggcagaaggaggagttactagtgaagattatcgcacgtttttacaggtactgatgttaaactcactaagtcacattttctttttttttttttttgagacggagtcttgccctgttgtccaggctggagtgcaatggcgcaatctcagctcactgcaacctctgcctcctgggttcaagcaattctcctgcctcagcctcccaagtagctgggattacaggcacacgccactatgcctggctaattttttgtatctttgttagagacggggtttcaccatgttggtcaggttggtctggaactcctgatctcatgatccacctgcctcagcctcccaaagtgctgggattataggtgtgagccaccacacccggcttacatttcttttaaaaacgtagatactatttagaaaaggatgtgccattcttcctatagggatctgactggtgaattataactgcactgttaactttggaaatggaaatgcaaagatgttattttaaatatgcacgctaatgacagtttgtatccttctttccccacccccacgcgtgcttcaactacctgtcaaaattaacagcagccttctggaaatatggatgacagtggttttttctctattcaggtaagtagtcacaagcatctactatgtgttgcttacatcccaggccccgtttcacagcctttcaatagtcactataacaaggcgaccttcagaagttcttctaatagatcatgtctacagagtataagattatactctagatcactagattgtgatccacctgcctcagccttccaaagtgctaggattacaggcatgagccaccatgcccggccaactagagtactagatttttatatagataaacatgaaaggattgtagaatcttcatattagagtggggcatttaaaaattcctttttgagaaagattatttaatttgcatctggatgctaataataaccttaattctggccaggcgtggtggctcacacctgtaatcccagcactttgggagggcgaggtgggcggacctcagggtcaggagatcaagaccatcctggccaacatggtgaaaccctgtctctactaaaaatacaaaaattagctgggcgtggtgatgcaagcctgtaatcccagctactctggagactgaggcaggagaatcgcttgaaccagggagtcagaggttgcagtgagccaagatcgcaccactgcactccagcctggtgacagagcaagactctgtctcaaagaaaaccaaatacccttaattataataagtcccaatgtctcaaacttaccatttgttgggtaaacttaagaaaatgcagtaccttgctaccatccttttaaatcagcctaccagactggatttccttattatggtctgtggcttttgatttttctctttgagttctttggtggttatatatatgtacttgaaagattcttttatctgcgtgtctttcattcttttctgacactgtgagttgtatccagaggtctttcagaacctctcctgagcgacctatctctgcagatacctttgtttgtatttctcttgtactgccctcctggactcctcctcatccaccagcatttccatctagtgctttaccgtgccactgttaacaggtaattgctactgcagggctggaatcagaggtcagagtaggcccagcacttggcgtttcctatttgtgccttgctgctcttggtacccactgccttgcactcactttctgtctttgccggtacctggttgacttgcttctttgttggctaccttggagggtagatagtgaattttcagaaatttcccattttttgtcagacagattgaaataatcaggtttgcattttgtttttttctacaagtggcaagcccatgaccctggaagtctgatacctatggaaacttcagtttaagtgcccagggagaacttattttggtagacacgatttctgacattgcaagtagtaagttgaatatacattttctaaagtagcacccacggcagccaaattaccagatgtatatagtagactagttttaagaatagcacttatgggtagaatatacatacatctggatttttgagacagttttatgtaggaattgtgtggttttctggaacatctcagagacctggtatgaaaagcactcttctaatatatatgtgtatgttttttatggatttagtgatatatctatacacacacacacttttgaaaacctatagccggctgggcgtggtgactcatgcctgtaatcccagtactttgggaggccgaggcgggcacatcacaaggtcaggagtttgagaccagcctggccaacaaggtgaaaccctgtctctactaaaaatacaaaaattagctgggtgtggtggcgcatgcttgtaatcccagctactcgggagcctgaggtaggagaatcacttgaactcaggaggcagaggttgcagtgagccgagatcatgccactgtacttcagcctaggcaacagagcaagactctttgtcttaaaaaaaaaaaaaaaacaaaaaaaaacctgtagccttctagagaaatttatatatgaggtacacaactaacatagctatacttcttaaagtgtttacacaactgacatagctatacttcttcaatttggaatggagtggtttggcttatgaaaagttactatttttcttaacaggttataagcaatgccttgaaagtttggggtttagaactaatcctgttcaacagtccagagtatcagaggctcaggatcgatcctatgtaagattttgttttgcatttcatacatttcttttcccaaatttgatttttaaagatatttcttaaagaagagaaatataattggaatacttgtgttttgatgttccctgtttcattccctcagactttcctatttcacctttgtgatgtccatgagcatctgccctgtagccttcctggcaccccagtgtctgtggcagcacagagctgccccgtaagtggtgcgtgaggccatcttttggcccggcatcactaagctgctgcagagacgttcatatggttgtgtgatcttttaaaaacatcagtgacacttaactgtaaatctaatcttaaattatcacaaattttatataatgtttgccagtagacaacataagtatgaattcaatatttcaagttaatattgtgtgttttcttttttagaaatgaaagatcatttatatgcaattataaggaacactggtttacagttagaaaattaggaaaacaggtaacatttcttacccttccttgtctttttttcttatattgtgccccatttaaaactaaaatgtgggccagatgtggtggctcatgcctgtaatcccaacagtttgagaggcttaggttgggggatcacttgaagccagaactttgaaactagcctgggcaacaaagggaggtcctgtctcttattaaaaaaaaaaaaaaaaaaaaaaaaaaaagccaggtatggtggctcacatctgtaattccagctttcttggaaggctgaggcaggaggatcacttgagctcaggagtgtgaggctgcagtgaactatgattgtgccactgtaccccagcctgggtgacagagtaagactctgttttataaaacataaaaagaaaaagaaattttaaaattaaaaagaaaaaacaaaaggattgctgactttaaaattaggaaactgactagtaatgtgtgtgtttgtggcatggttatctatcttgatagatagaaatttgtcattttaaaacatatcagttttccttgtaaatttatttgtgacaagtatatgcaatttaactatatcataagaaaaattctatattaaatataatacaaatgtggttactttgaagtgggtttttatgtgatgactatgttctgtcagttaattactacatttgtagatttgtatttagcatagtgctgtcacaaagcctgaaatagtgtcaagcatgaataaagcattcaattatgcttgctttagtgtaagattattcatatgattccaaaagccatgtaatacatacgtctacataaaatcacttctatttgttaaataaaacatgaaatatgtcttgagcaagctattttaagaaacagaatcatttaacatcctttttattagaattttgaatctttgaaagagggttcttgaaaaccagctagcacagtaaaaaagaataaactagtgatacatgcagcaacatggatgaatctcaaaataattatgctgaaagaataaccccgaaacagaatactacatgctgtatggtatcatttattaaaagtctagaaaagtgcagattcatctgtagtgatgaaaagcagatccaccagtggttgcctggggatgaaaaggctaaggaagagtgagaggggggagggtcagagagaggcatgggaaacgtggcagtgattaatgtgtcacagtgttggttgtagtaatggtttcatgggagtacagtatacaaatgtcaaaacatttcaaaggccaggtgcagtggctcatgtctgtaatcccggcacttttggatgccacggcaggaggatcacttgagctcaaggagttcaggaccagcctgggcaatgtcacaagaccccatctctacaaaaaaatgaaaaaaaaaaaaaagaaaaattggctaggtgtggtgatacatgcatgtagtcctaggtgctagggaggatgaggagggagcccagaggtcaagcctgcagtgagtcatgatcgcactactacactccagcttgggtgacagaaggagatcctctctcaaaaaaaaaaaaagtttcaaattgtacactttaaatatgtgaagtttattatatatcacttataccccaataaagctgtttgtttttttaaaaaagtaaataaaagccaaaaaagatatgtcaagaaagtatattgaattaaatctataagagataattcaaaaacaaaaaccctattgttatcttttaagtcacccaaatcaaatttgggaaaagtcacctacttagcttcatcctaagttggttcgttctttctttctttctctctttctctctttctgatggattcttgctctgtcacccaggctggagtgcagtggtgggatctcggctcattgcaacctccgccacccaggttcaagcaattttcctgtctcagcctcccgagtagctgggactacaggtgtgcaccaccacacccagctaatttttgtatttttagcagagacggggtttctccatgttggtcaggctggtcttgaactcctgacctcaggtgatcctgtccatctctgcctctcaaatacagggaatacaggcgtgagccaccatgcccagccctaagttggttctttcttaaagttcttcctgaggagccaagagcaagttaaggaggtgtaatctagaagcttacagtggaggctagctgggtgcagtggttcacgcttgtaatcccagcactttgggaggctgaagcagggagatcactgaggccaggagcttgagaccggcttggaccaacacagtgaaaccttgtctctaccgaaaaaaaatttaaaaagtgcaacttagagcagtagaggctgacacgagtgggaatcacctctaggtaaaaaccagggtagggtactgctgagattatttaacctctgggttttatttacgtgtttttaaaaattatgatccagtattctttactttttttgtataaagtaagcactgaatttttaaggtctgtagacttagatttcagaagtaccctcgtattaatttgcaaataaatgtctatcttattattttgagagatttaaaaatttttagttcttcaaaattgaattttcacattttgaattacattatctttgacaaatacagatgatgttggccgggcgctgtggctcatgcctataatcccagcactttgggaggctgaggtgggtggatcacctgaggtcaggagttcaagatcagctttgccaacgtggtgaaaccccgtctctactaaaaatacaaaattagctgggtgtgttcgcgcatgcctgtaatcacagctacttggaaggctgaggcaggagaattgcttgaacctgggaggtggaggttttagtgagccaagatcacgccattacactccagcctgagcaataagagtgaaactctatctttaaaaaaaaaaaaaacaaaaaaaaaacaaatacagaagatgtcaaattttggtttattttattttctttggttctaatttatatttttgtttaaaactatatttttcactatagactctgtctgaggtccctgtataataaaaaagaaggctggaaaaagtattaacattgtcaaaatccaggaaaatagttggtcatgatactgacagtaactttaaacactttttgtatcttgtgggttaaattaggattactttgtggtagtgataaatgatgttaattagggccgagtgcagtggttaacacctgtaattccagcatgtagggagactgaggtgggaggatgtcttgaggccaggagtttgagaccagcctgtacaacacagagacccccatttctacaaaaaaaattagaaaattcgtcaagcatcttggtgcacacctgtagtcccagctatttgggaggatgaagcgagagaatcacttaagccaggggttcaaggctgcagtgagttatgattgcaccactgcactccagcctagatgaccatctctttaaaaaaaaatgtgtttatatgttatatgtgatagtgttttttaaaaacatttttaaattatagagggtctcactatgttgcccaggctggtctcaaattcctgggctcaagcaatcctcccacgttagcttcccaaagtgcttggattataggcatgagctgccatgcccacctaatttagtgatttttaaaaactgagttggtaattataaattatcttcctggaacttctgactttctcacaattggaatcttttgacaaaaattatcggtaatgggaaaactttgtatagttgtcatttttcctcccatcagtatgatagatgcgattagagttatgttggactgatactttgaaaaaagatttaactatagctattaataaagacatttcaactacggactatccatttttattcttttgggagggtttaatgtttatagtttaaagcaaagtgttgtttttaaaaaactatttaacagggccgggcgccatggctcacgcctgtaatcccagcactctgggaggccaaggcgggtggatcacaaggtcaggagatcaagaccatcctggctaacactgtgaaaccccatctctactaaaaatacaaaaaattagccgggtgtggcggtgtgcgcatatcgtcctagctactcgggaggctgaggcaggaggatggcatgagcctgggaggcggagcttgcagtgagccgagattgcaccactgtactccagcctgggcaacagagcgagactctgtctcaaaaaaaaaaaaaaaaagagtatctaacagaggccgggtgcagtggctcatgtttgtaatcccagaactttgggaggccaaggcgggaggatcatttgaggtcaggagtttgagaccagcctggtcaatgtggcaaatgtgctgtctctaactaaaaatacaaaaattagctgggtgtggtggcgcgggcctatagttccagcttcttgggaggctgaagcaggagaattgcttgaacctgagagacggaggttgcaatgatctgaggtcatgccactgcactccagcctgggtgatagaatgagactcttctcaaaaaaaaaaaaaaaaaaagtaatagtgataaatctgcagtattctcttttaagatattattcagtcagaggaaagagctcaacttgaaatatttccagagtttaaacaatcttactaaactttgatgggttatatctgttcttaacatgtgaaactactttattacctataatatgcactaacttaaatattgacaattttttttccagtggtttaacttgaattctctcttgacgggtccagagttaatatcagatacatatcttgcacttttcttggctcaattacaacaggaaggtaagtaaaggctgaaaattttgtaacgttatctttcgaagtagttaaataaactggagcattagatgacagtgtgacaatactgtttttctggcagtggcagtgaaacaatctttaggtttgacgtggtgataggctgtgatttgggtgacgctgttccattagagttctcactggcacctggccctccctcttctgaggatgctgctttctttgcagcccttctaagtaatggttttttcttttatacatcacataccacacagctgagaggagggatagatatttttcttttttgcctcttctaggccactgttcttccctataaactccagtttctttgaaatacatgcccctaagggccagttgtggtggctttcgcctgtaatcccagcactttgggaggccgaggcgggcagatcacgaggtcaggagatcaagaccatcctggctaacggggaaaccccgtgtctactaaaaataacaaaaaattagccagttgtggtggtggacacctgtagtctcagctatttgggagactgaggcaggagaatagtgtgaacccgggaggtggatcttgcagtgagctgagattgcgccactgccctccagcctgggcgacagagactccatctcaaagacgaaagaaatacgcgcccctagattaaactatcccttgcccttttgcactcatccaaaagtctcttttcatcagtgattttaggatctgactcattgtgtttttctctacttcaactccttttatcattcttaatgatttctgtattgctaatcaatccagtaatccagtacctacttcttagtttcaaaatcactcactcttgcttagctattaccaataatcataaccactgtcaaatctcaattgcaagcgtattactctttaactaccacctcctatccttaaaccatgttttatctgttttttttattccagccattctttaaaccctaccgtggggcccaagcatttcctttatatgcattcttcctttcttctgctgcttattttctgtaattcattgttataatcactccattgcattcttcagcttgtttcccccttctctccctccatcatacttgaatgacaaaaatctcaaccctggttaaaaccaaatcttggccttgtccattcctgtaccagagtagcaggatatggctaaaaaataacataaaacatgatgattggttttacttttttcttaaacgatctatccatccattcacccatccatctgtctatcaaagtgactaggcctctctgaagcccaggctggagtgcagtgacatgatcacagctcattgtagccccacactcctggcctcaagtgatcctcttgcctcagccttttgagtagctgggactacaggcttgtgctaccgcacctagctaaggttttactttaaatttattataatcacaaaattcagatgagcctttagtgctgcctgatatttctactatgttttcttagtaaatccccataccactctccaagatgtttataaaaaatcatgtaccactctccagacgtttataaaaaatcatgtgccactcttcagatgtttataaaaaatcatgtgccactttccaaggtgactaatttcacagcttctgtcttcaaacctttaaccactttcctctcccttccttacacaccttgcgtatggccttccattacattctgctgagaacatagaagcaattaaaattatgttcttacctttctaccagcaagtgtactaatttgcttatatcttcacctgtgctttgcgactactaaaatagatgaatggtcccctacctctagcgaagaccagtccctcacttgtgggctggatcccagctcctctcacctactcaagatgttcctgctttcatctctccactctcttgtataatcagttccccccccgccctttttttttttggtaatgtacctataagcagaaaaataagctttttaactccagtaattaaaaagaaaaatcttctcttaattccatgaaactccagctgcctccccatttttattttttccttaggattgtctctagtgtgccttctccttttcttgaactccgcctcctgggttcaagcgattcttctgcctcagcctcccgagtagctgggattacaggtgcgtgccaccacgactggataattttttctttttttttgagatggagtttcccttttgttgcccaggctggagtgcaatggcgtgatctcggctcactgcaacttctgcctcccgggtttaagcgattctcttgcctcagcctcccgagtagctgggtttacaggcatgagccaccacgcctggctaattttgtatttttagtagagatggaaggggtttctccgtgttggttaggctggtctcgaactcctaactgcaggtgatctgccacctcagcctcccaaagtgctgggattacaggcatgagccactgcgcctggcccctggctaagtgtttttttatttttatatttttagtagagacagggtttcaccatattggccaggttggtctcgaattccggcctcaggtgatctacctgcctcggcctcctaaagtgctgggattacaggcatgagccactgtgcctaaccatcttttagtaatggtatttagagatcacaatttgagtgctggcatgcttattgctactgggtttgttatgtagttattgtgaattcacatttaggaatatagagtttttaattctttgattttagatacttgtatcttttttcttttatagttaaaaccttggttcctaatgatatcccttcttaaaaaccctgtctgcccttgacctccagcccaccatgctgtggttttcctaacttgttgcctgcatctttcagatccctttcatggatcttaggtatatctctaaataagatctgtgtgtcagtaattaccaaacttttatctttagtcttgacatctaccctgaacacctagctttgactaactcctagctttggcatctccactttgaagtccaaaaagcatttcaaactgaacatgtctatgaaagacttattttttttttctatccatgctatctatcaggttttccatttccataagggtgacacttcttgtactctggttcctatatattatactgatagagccgctcagagtgcttcttaaccagtgtaatgcctgttatgtcccaccctcactccttgtctttcagtggcttcccagcacacttagaataaaatctgaagtcttaggctgagcgtggtggctcatgcctgtaatcccagcactttgggaggatgaggggcagatcacttgaggtcaggagtttgagaccagcctagccaacatggtgaaaccctgtctctaccaaaaaaaatacaaaaattaactgggtgtgatgttgtgcacctgtagtcccagctacttgggaggttgagataggagaatcacttgaacccaggaggcagaggttacagtgagccaagatcataccactgcactccagcctgggtgacagaacaagactctcaaaaaaaaaaaaaattgaaaagtaaaataaaatctgaagtcttgaataaaacccaagatcttgaccatgacccctgaacagggcagagtatccattcttcagacactcttcatagaataccatggtgagctggcatatttattgtacgatatagaaacagttttactggcagaaaacacattaaaccatttgaactctgaatacagttgtcctcataaaaaatgttcattgtactattttgaggttttccattagtagttcttacaatctttgtcccattatgtgttaattctaacaaaggatatccaataacaaacaccagagtttaagaaaaatgtgccaggtgcggtggctcacacctgtaatcccagcactttgggaggctgaggtgggcagatcacctgaggtcaggagtttgagaccagcctggccaacatggtgaaaccccatctctcctaaaaatacaaacattaaccaggcgtggtggcgggtgcctgtaatcccagctactcaggaggctgaggcaggagaatcgcttgaacctcctgggaggcagaggttgcaatgagctgagattgcaccactgcacttcagcctgggtgacagagtgagactccatctcaaataaaaaataataataataattaataatagaaaaacttagattgttttaggtatagcccactcttagtttttgtgtgtagcatctagcttggggaaaccctggatttctggaatcatatttatacacagtcacactagactaatgtaattcttttgggatgcaaaccacacgtttgacaccttaaatagcttttaggtatttggcttctcagctcctatttttagttacaaggggtgtacatgtgtgggtcagggtagctctttccacagatgattagttttagccatgttactagttattgcacacattatctgactgtgtcctcaaaacagccctgtgagtgtattagtcagggttctctagagggacagaactaataagatagatgtatatatgaagggtaatgtactaaggaatattgactcatatgatcacaaggtgaagtcccacaataggctgtctgcaagctgaggaaccaggaagcctgtccaagtcccaaaacctcaaaagtagggaagctgacagtgcagccttcagtctatggccaaaggcccaagagcccctggcaaaccactggtgtaaattcaagagtccaaaagatgaagaacttggagtctgatatttgagggcaggaagcatccagcatgggagaaaggtgaaggctcagcaagtctggtccttccacactcttatttctgcctgatttattctagccgagctggcagctgattagatggtgaccacccagattgagggtgggtctgcctctcccagttcactggcttaaatgttaatctcctttggaaacaccctcacagacacacccagaaacaataatttgtagccttcaatccaatcaagttgataatattaaccatcacaggaaggtaccagtatcattatgtttaacagtagaaaccaagacaaatgcagctaggaagtgggagaactgggatcagatgcaggcagtctgattctcaatcagttgctcttaccgactcctttactctctctcataccagtaagtgagtagcctgctcagtcaagtgctatattagtagggccctttacagacatttacttcgcacagtcactcagtgagacggctattccagtcttacaatggagaaagtgaggctcagagattttaagtaacttatcctagatgactttactagtaagtataagaatcattatttgaactaaaatctttctgaatcctcagcttgtatttttttccagtgtactgtgctgcctctttactagcattttacatcaattttgaatctctttactagctgtttaggttgatttttgcctttttgttttaggttattctatatttgttgttaagggtgacctgccagattgcgaagctgaccaactcctgcagatgatcagggtccaacagatgcaccgaccaaaacttattggagaagaattagcacaactgaaagagcaaaggtaaaaatgaggcctgcagtatggaacatatgacgatatttcattatgagaataaaattttcatgcttacattgaatatgtggtccttgtgttgtcggcacctctattttggaccttacattttagtgaagtttattagttcgaacgtgaatcaactctttgaaatacttaaatatattaactaagttagcaggtatggtgtattcctagcacttcaggaggctgaggcaggctgattgcttcaacccaggagtttgagaccagcctgggcaacatggcaaaacctcacctctacaaatagtacaaaaattagccagacgtggtggtgcgtgtctgtagtcctagctacttgggaggcagaggaggaaggatcacccaaaactggggaggtcgagactacagtgagccacaatcacaccaccgcactccagcctgggcaagagagtcagaccctgtctcaaaaaaagaaacagagaaaaaaaacttagttggattcaaattacaacacaatcattatattactagagcttatttgccagaaaacgttttaagttttggcttacgtaaagcctttacattacaaatgcctttatgttatgtctaaaatagaagattggttgcagttactaccagtgcttttgttctttagagtccataaaacagacctggaacgagtgttagaagcaaatgatggctcaggaatgttagatgaagatgaggaggatttgcagagggctctggcactaagtcgccaagaaattgacatggaagatgaggaagcagatctccgcagggctattcagctaagtatgcaaggtaaagacattctgatgtgtgttgtattcattgctgaagaattgattccaattattcttaggtttcctggaagttaatgtactcttagaagtgttttgacaattactgcagaagcaatagctatatagtgggctttccctttagatttcttataatggaaataactttttacaacctatattttattaggagtagttatatttttactcctggttatttatttggtttcaataacctgtactaacacagtagtcaattgtggtgttaatctttgtgggtatcagttgacccttacccaaatcagctctttcataaatgtatgtcattagacactatggaagggcctggacaggggatataaactgattatacaaaaagccaacatttattggctatgcaacttaaaccttaagcccgctttggtgggcccagttttttagtgatataaactatcaatttcaaaagtgaaaacatatcccctatacagtctaggcaaagaaaaatgttaagacatagctcgaagttgcttaattaaaagtttgaagtgggttttttgttttatttttctctaacttatgtgtatttgcttctactttctaatgaaattatttatcaattgatttccttagatatccagataaaattgagattccattaatgggaagattattttcatcctgaacttttcttgcctctaggcacacctctgagtactccatatggtgtgcaatcccatttttgattaatagagtcctgctggattagcagggacagaaatcagctttagatttcttttgttttttgaattaagagtctcactgtcgcccagcctggagtgcaacaatcttggctcactgcaacctctgccttccgggttcaagcgattctcctgcctcagcctcttgagtaactgggactacaggcacctaccaccatgcctggctaattttttgtacttttagtagagatatggttttgccctgttggccaggctggtcttgaactcctcacctcaggtgatccacctgccttggcctcccacagtgctgggattacatgtgtgagccaccacgcccagccagaagagtagaatattcttcaagaaaaaacattttaaaagcttactcaaatgaggataaacaaatgtattgttgcttgaattggtaaatacagtgattggtttttgttctgttgtgttttgttttcaggtagttccagaaatatatctcaagatattccacagacatcaggtacaaatcttacttcagaagagcttcggaagagacgagaagcctactttgaaaagtaaagtagttggtacaaattaaagtagcacgtttaatatttgctttggctattttgtctgtttgtaaatggttactgcctgaatcctatgaatatttgaatgcatatttaaaaaatttacagcaaataggacaggcacggtggcttacgcctgtgatcctagcactttgggaggccaaggtgggcagattgcctgaggtcaggagttcgagaccagcccaggcaacacagtaaaactccatctctactaaaaaatacaaaaaaattagccgggcgtggcagtgtgcgctgtagtcccagctgcttgggaggctcagccaggagaattgcttgaacccagcaggtggaggttgcagtgagccgagatcgcaccactgcactccagactggttgatacagtgagactgtctccaaaaatatatgtgtgtatatataaataaaaataaaaatttacagcaaataacatgaagcaaaatgtagttttaatgaaaaagtttgcctcaatactggataaatttttgaaactgagtgaaggaaaccttgtacaatttcatttattaaaagaaaaatgaaattaggacaaggcaagaagaatacctattgatcctttggatgtgcttcttgcttacctgattaaccctgcaaaatttctctaccaatcagtaagaaaaacagcttttgaggtatgggagcacattcccaaatagacatgggtagttcatttagctgctcatggctgctgcagggggtcctgtaggcctgttagcatcaggagaatggatgcaaaccataaatctggatcaactcctaaaactttaccttgtgcccagccttgtaagtgcttgctaaataggaattccactgtatgaaaatacattcttttcaagtaactatcattcagacttttgtcccccacttttttaaaaaaagaaaaagaaaaggctgggtgcagtggcttacgcctgtaatcccaccattgtatgaaataggaattccactgtatgaaaatacattcttttcaagtaactatcattcagacttttgtcccccacttttttaaaaaaagaaaaataaaaggctgggcacagtggcttatgcctgtaatcccaccattttgggaggccaaggcgggtctttgggagtgagtttttgggaggcaggagaatcgcttgaacccgggaggcggaggttgtggtgagctgagatcgcgccattgctctccagcctgggcaacaagagtgaaactccgtcttaaaaaaaacaaaacaaaacaaaaattagctgggcgtggtggtgggtgtctataatcccagctactcgggaggctgaggcaggagaatcgcttgaatccgggacgcagaagttgcagtgagctgagattgtgccactgcactccagcctggggacaagagcgagacctcgtctcaaaaaaaaaaaaagaaaaactccatgttaaaaattacaagataaataatcagacccgctgatcctaggtcagaaaacaaaagactcatagctgaatctgacctgccattgctgtatttcatccattctaagatgcacatagtttcacatttcaatgtctctgaaattgagaagtatcttacaatcataattgacagtatattagcagcacctaaaaatattggctcattttacatttgatggtataatgaagaaaatatttacctttttttctgttttgtttttaagtcacaactcagaagtagatgaaggaaaattctgatcagctgacatcctcttaatgtgagatatttctagtctttattcagcatagattaatggctaattatatgttacatttcaaagtagtgcttattagtgctttttacttttaagtttcaaaattaacttttttattaaactccaaatttatacaaaagtagaaaaactagcataatgaactcttgtttatcacccagattcaacaaatactagcacacggccaatcctgcttttttttttttttttttttttgaggtggagtcttgctctgttgcccaggctggagtgcattggcacaatttctgctcactgcaacctctgcctcctgggttcaggcaattctcccacttcagcctcccatgtagctgggattacaggtgcacaccaccatgcccagctaattcttatatttttagtagacacagggtttcaccatgttgcccaggctggtcttaaactcctgacctcaagtgatccacctgcctcggtctcccaaagtgctgggattacaggcatgagccactgcacctggcccagtctcgttttataatactcccatctcccattctttccactgtcccacctacaagtttggattattttgtaacaaatctcaatcatcatatcatttgttctataaccattttaatatatgtctctaaaatatatgaactttttttaacatagttaaatgctattgtcataaaataatcatgataattaattgtaattctatatcaccaattatctagttaatgtaaaaaataacttaaatctaaggccaggtgcggtggctcacacctgtaatcccagcactttgggaggcggaggcgggcgaatcacctgaggtcaggagttcaagaccagcctgaccaacatggagaaaccccatctctactaaaaacacaaaaaaatagctgggcgtggtggcgcatgcctgtaattccagctagttgggaggctgaggcaggagaatcagggagacagaggttgtggtgagctgagatcttgccactgcactctagccttggcaaaaagagtgaaactctgtctcaaataaataaataaataataaaaaaataacttaaatctacttaattagaaaaactaatattctggaaattttattttaagaaatatctaaattggccgggcacgatggctcacacctctaatcccagcactttgggaggctgaggcgagcagatcacctgaggtcagaagggtcaggagttcaagaccagcctggccaatgtggcgaaacaccgtcgccactaaaaatacaaaaattagctgggcatgatggcgagcccctgtaatcccagctactcaggaggctgaaacaggagaatctcttgaacccaggaggtggaggttgcagtgagctgagatcaccccactgcactccagcctggatgacagagtgaaactctatctcaaaaaaacaaacaaaaaaaagaaatagcaaaattaaaagaaagcatacatggccaggtgtagtggctcatgtctgtaatcccagcacttttggaggctgaggcaagcagatcatttgaggccacgagttcaataccagcctggccaacatggcgaaagcccgtctctcctaaaaatacaaaaaaattagtcgggcatggcggcgcacacctgtaattgcagctactttggaggctgaggcaggagaattgtttgaacccagaggtggaggttacagtgagctgagattgtgccactgcactctatcctgggtgacagagcgagactctgtctcaaaaagtaaaaaaggggccgggtgcggtagctcactcctgcaatcccagcactttgggaggccaaggcaggcagatcacaaggtcaggagatggagaccatcctggctaacacagtgaaaccccgtctctctactaaaaaatacaaaaaaaattagctgggtgtgatggcaggcgcctgtagtcccagctacttgggaggctgaggcaggagaatggcgtgaacccaggaggcggagcttgcattgagcagagatggcgctactgcgctccagcctgggcgacagagcgaggctctgtctcaaaaaaaaaaaaaaaaccgtcacctcctttagtaactgatgttagtattttggcacattctctttctgtgacttatacacacttaccttgtaagtgttgtactcatttcctatgacagtaaatagtctttgtaacaggctgcatgatatttcataaaatgaatggatgtggcataatttatatatgtgccttttgaattatgctattataattaatactgcaatgaacaattcttatattgcctctatgcctcaaatgtctcatcatttcttcttttttctgaggatgtcagattactgggttaaagggtatgaatatttttaagaccttggtacagatttctaaattgctttccagaataattcccatgtgatactttcatcatgtttatttcagactttctttttccttttttgagacgaaatctcactctgtcacccaggctggcgtgtagtggcacaatctcagctcactgcaacctccgccctctgagtttaagcgattcttctccttcagcctcccaagtagctgggatcacagacaagtgccaccatgcccggctaattttcgtgttttttgtagagatggggtttcaccatgttacccaggctggtttcgaactcctgagctcaggcaatctgcccacctcggcctcccaaagttctgggattacaggcgtgtgccaccacacccggccatcagacttttttttatgccattttttgccatataatggtctaaagacatacatcatatagaaactataatacaaaatttataggtatatctaagaaaatgaaagtatatttaaagcataaaaataaacccctcttttacttaaaatttttaaaaaattggattaaaaatatgaaacttccaacaaattgaacttttttttttttcttttttgagacagggtcttgcttttgtcacccagactggagtgcagtggcgtgatcttggctcactgcaacctccacctccctggttcaagcaattcccctgcctcagcctcccaagtagctgggattacaggcgcatgtcaccacgcccagctaattttttttgtatttttagtagagacagggtttcaccatgttggccagactgggctcgaactcctgacctcaggcaatttgcctgcctgggcctcccagcgcgctgggattacaggcatgagccactgcacccagcctgaacgttttatagtagtaaagataattcagtaatgcccaataatgactaagtaagttataacaagaacaatgtcagcaataactagtgctttttagtaaacagggtcaggcaaccttgtaccctttaaaaatgttcaaatcttgatataactccttcctaattggagcaggattgattgaggaggaaagtgtgcagtgatggttaccagcttcagcctcttggcttgactttgcaaatactgtggagaatttggaaagagcttgagaatatcttacatagtcacatgttgctgagaagagttaagaactaacttcttgatgttcatttttaatagtggtttgcattcaaaaccttatagagctcattagtaggagagctgagaagctaatatttgcttttcactaaaattcctgattacttagcctaggtagttccttgtctctctaggttctgtctttgggagcttggctctaaggttatcaagctaactctttcttacctcttacccttcccaaattgaccctggttctgatttgttattcgtatgattttctagtttttcttttccctttttgagtatttgaagcttcatactgaatatagtaatcatagtattcatgcataaagaaaatcataaagtaattgcataaatccataaagtaatcatagttttcatgcattaaaaaaactagtttaggccgggcgctgtggctcacacttgtaatcccagcacttttggaggccgagacaggcgaataatctgaggtcaggagttcgagaccagcctggccaatatggcaaaacctcttctctactaaaaatacaaaaaattagccgtgtggtggtgggcactgtaatcccagctattcagcaggctgaggcaggagaatcacttgaacctgggaggcagaggttgcagtgagctgaggtaatgccgttgcactacagcctaggcgacaagagtgagactcttatctcaaaacaacaacaacaacaaaaactagtttctctctagtgtaaaaaatactgttaagccgggagtggtggctcacgcctgtaatcccagcactttgggaaggcgaggcgggcagatcacaaggtcaggagatcgagaccattctggctaacacagtgaaaccccgtctctattaaaaatacaaaaaattagccaggcgtggtgacaggcgcctgtagtcccagctactcaggagactgaagtaggagaatggcgtgaacccaggaggcagagcttgcagtgagccgagattgtgccactgcactccagcctgggctacagagcgagactccatctcaaaatatatatatatatagactgttaaaaagtctccctattacagattcataatttatgagtcattaaataatatttttaagccatgacattttttccagcaggagtctctaaatctgttttaccactgtaaaaccccaagcaaaactctactacatcagctgtgtcactgtaaaacctgccttaactcacatcagtatgaaattaagcaatgtgtgtgaaactattttataaactgtaaaggattccatacatgcatgttggcaattattaatgtcttctctaggtgtggctttgaaacagatgcagattctttctgctacaaaaaacatagttacaaatgttttgtaacaaggagagacacaaatatcttcatggacatggattgctatgagtttttgattgactaatacttgagccaccacttcagtgatggtataatttatcaaacagtattgagaaacagaaactactggggatgttttaaggagaaaaagtacttaatagagaaattagggttttacataatcttaagaaaagatgaaggtgcagatcttagccaggcctccagagtaccacaaaccaacttgcaggaagagctgtaaccactgccccaattggcacaatgggtaatgaggatattaaatttaagaacacactgctatagcaatgatcctgggcttagaaagctgccaccacaattgcctagacatgggaagtctggcccccactgcaaaagcagtgaagcagaattttgggactggcatctccatgactttgcttgccaccagagaacaaccaaagtagggagatggctggccttatttctgcctatttattttattttattttttgagacagactcttgtctgtcacccaggctggagtgcagttgtgtgatcttggctcactgcaacctccacctcccagcttcaaacaattctcctgcctcagccttctgagtagctgagattataggcacccgccactgtacccagctaattttcttatttttagtagaggtgggtttttgccatgttgaccaggctggtctcgaactcctgacttcaggtgatgcacctgcctcagcttcccaaagtgttgggattataggcgtgagccaccatgcctggcccatttgtgcctttttttttttttttttttttttttgagatggagtcttactctgttgcccagaccagagtgcaatggtggcatcttggctcattgcaacctctgacttccagtttcaagcaattctcctgcttcagcctcccgagtagctgggactacagctgtgcagcaccatgcctgcctaacttttgtttctgttttgtttttttgagatagagtcttgctctgtcacccaggctggagtgtagtggtatgatctgggcttactacaacctccgcctcccgggttcaagcaattctcctgcctcagcctcctaagtagctgggactacaggcacgcaccaacacacccagctaatttttttgtatttttaacagagatggggtttcaccatgttggccaggctggtctcgaactcctgacctcgtgatctgcccgcctcagccttccaaagtgctgggattacaggcatgagccaccatgcccagacaatttttgtatttttagtagagacagttttgccatgttggccaggctggtcttgaactcctgacctcgggtgatccacctgccttggcctccggaagtgctaggattacaggcgcaagccaccgtgctcaacccattttggccttttaaagctcatgtgagcacttaatttgtaaccagaatcctacttgtaaaataatctaagacatgtagcttttagctttgtagcctctataatattaatggcacagtgggagtggatgctgagtgccacttaaacatgttccatctcagtgtcttcacagctggaaggtgtcaacattgtttcaaggtgggcaattgatttacttctcacttttcataaactaaaagtagaataaaggctattcctctaaaattgctatcttacctgtcactcccttgcattctcacctaccttcttgagtggaggggaagagggcatggagtgatagctgatgtgccaggaattctccatactcagtccgtctttcttgtgccatgtcgcagcatcaggatttgctaatgggagggtactgcccttatgtgcatcattagccatgcacactaaagtcttacacctacacacaggtcagtattcgggcttagagaccaacagggaaaaattgcagttctcattggttgaactttattgttcacagttttaaaacacaaaattgagaggaactctagaaaaaatgtgtcattctattaataattgttgctggtagtttaaaaattctggttccttttcaaattcctatataccccccccccctttttttttttaataccttgatcttagccaaaacaccgagaagcaatcttttttttttttttttttttaacctatggcttctcactgagattgtcagctgttggtaagttttggtttttggttttctgtgtttgtatttacatgtatgaaatctagattgagtatcccttatccacaatgcttgagactagaagtgttttagatttggggttttataggatttgtgaatatttgcactatacttgccagttaagcattccaaatccaaaatctcaaatctgaagtgctgcactgagcacctcctttgagtatcatgttgatgctcaaaaagtttctgattttggagcatttcgatttcagattttcggatttgggatgcctgacctgtaatttcagatttacataaaagcagaaatagtacacagagcgccttatatccttcacccagattccccaattgttggcctttctgaaccatttgggaataatacgcagatatgattttccattatgtctcagttgttcagtgtgtattttctgagtacaagaatatattcctacatatttacatcataactatcatgtttaaacattttaaaagtggggatttgaattacattgtttttccttttgaaaaaattacagaggagctgaatgcaatcaatattacttaaaatctgataatgtgtgttaaatagtagttttcatttatcaagtgttcagtaaatgcttactatgttgtaacagcacggttatcagcactgttgaaatagatgaacaagttaacatttgcactctcattagcttacacgccataaagagggaaataaggagaacaccagatggtaagtttatgctgagaattaaaacgaagtgatgaaataatgagaatgtcagatggctacttttggtgggatggtcaggaaaggcatctctggggagattgttaagctcagacctgaatcaaaagaatgagccagccatggaaacattatgttaactcacatggtagtttgagatgctttatctgatcaaaggtacttattttcagtgactttcaacaatattaagggtctataaaccaacactcatttgcataagaatagctaccagtgaatctttttgtatgataggtttgtttgtttgtgtgtttgtttgttttttgagacagagtcttgctctgtcacccaggctggagtgcagtggcgcaatcttggctcactgcaatctctaccttcccagttcaagtgattctcctgcctcagcctcccaaagtagctgggattacaggtgcctgccaccacacctggctaatttttgtatttttagtagagatggggtttcactgtgttggccaggctggtgtcaaactcctgacctcaggccatccacctgcctcggcctcccaaagtgctgggattacaggtgtgagccaccatgcctggccatgataggttattttgtgatgaaaatacctacctcttaatttgtctgataaatttaaattttatgtctaggtttcctaggatcaacacttctatattttaaagtaatctatatcagactaactgctcttgcattcttttaatgtcagtgactactttgatttgtggaacagtgtattttccacatgaatagtttttctcatggtgtatttattcttttaagttttgttttttaaatatacattcacttttgaatgtttcagacagcagcaacagcagaagcagcagcagcagcagcagcagggggacctatcaggacagagttcacatccatgtgaaaggccaaccaccagttcaggagcacttgggagtgatctaggtaaggcctgcttcatcatgttcgctaccttcacacttttatctgacatatgggctccctctgatttttgctttacattattcttcatcccctctttaatcatattaagactcttaagtaaatttttaatctactaaatttccctggattaaggagcagttaccaaaaaaaaaaaaaaaaaaagctagacgtggtggctcacacctgtaatcccagcactttgggaaaccaaggcaggagaggattgctagaacatttaatgactactttaacataataatttaaacttcacagtaatttgtacagtctccaaaaattccttagaaatcatgatttattttttattttttgagacggagtctcgctctgtcacccaggctggagtgcagtggcgcaatctcagctcactgcaagctctgcttcccaggttcacgccattctcctgcctcagcctcccaagtagctgggactacaggtgcctgccacttcaactggctaattttttgtatttttagtagagacagggtttcactgtgttagccatgattgtctcaatctcctgacctcatgatcttggcctcacaaagtgctgggattacaggtgtgagccactgtgcccagccagaaatcatgaatattagtaggtgaaaaataaatacattttaccacccagaaaatgaaaaatacttgagtataatctaaataacaatgggaagtgcagagttactttccaggtctcggtttaaatatgtcttaaagtttggccaattagtagtagaagttgagagaaaaagtaactgtatctgacaaagaaattataagcagaatatataaagaactcttaaaactgaacaataagagagcaactcaataaaaaggtgaagaatttgaaaaggtacttcaccaaataagacatagggatgacaagcccatgaaaagactctcagcatcactagtcacagggagatgcacaataaaaccacaatgagataccacggcacccctgtaggtgtggcttaatgaggaaataaaactgacaataccaagtgttgacaaggatccaggcagctgagactcatacactgttaatgggaatgtaaaagtgtacagctttgggaaacagtttggcatttttttgataaatgtatacttagccatatgatccagccatcctaatcatgtatatataaccaagagaaaagaaaacttaggttcacataaaaacttgtatcaaatgcttatagctggccaggcatggtggcccatgcctattatcccagcactttgggaggccgaagttggtggatcacctgaggtgaagagttcaagaccagcctggccaacatggcaaaaccccgtcttctacttcaaatacaaaaattagccaggcatgatggcgggcacctgtagtcccagctcttcaggaggctgaggcaggagaatcacatgaacccgggaggcggaagtttcagtgagccgagatcgtgccactatactccagcctgggtgacagagcaagactgtctcaaaaaaagagggctggacacagtgacttacgcctgttatccccgcactttgggaggccgaggctggtggatcacctgaggtcaggagttcaagaccagcatggtcttggtcaacatggtgaaaccccatctctgctaaaaatacaaaaattttctgggtgtgatagtgggcacatgtaatcccaggaggctgaggcaggagaatcacttgaacccgggaggcagaggttgcagtgagccaagattgtaccactgcacttcagcctgggcgacaagaccgaaactccatctcaaaaaaaacaaaaaaggattatagcatctttattcataattgcccaaaattataaactgcctaaatgtagaccttcatttagttaacgaatacacaaactgtggtatatccaaacaattgaataataaaagggatgaactggtacttttttctattcctcctcttaagtacagccaaaacacctcaacatttgtataaaacataagctgggccaggcgcggtggctcacacgtgtaatcccagcactttgggaggctgaggtgggcagatcacctgaggtcgggagttcaagaccagcctgaccaatgtgcagaaaccctgtctctactaaaaatacaaaattagttgggcatggtggcgcatgcctgtaatcccagctacttgggaggctgaggcaggagaattgctcgatcccgggaagcagaggtcgcgctgagctgagatcgcaccattgcactctagcctgggcaacaagagcaaaactgcgtctcaaaaagaaaaaaacatgagctgaatctcaaaggcagggagaagacagaccttggaaccagaggagcagcgtggtggggagtggcctggattttctttttgcctcatttatcctgggcttggtgctggagaagctgtgggctcagaccaagagaaaaccccataaaaagcctgctctctttagccaaaagaggcagcctagcaagacaaaaacttttagataataagcacttgactatagtcaaacaccacagaataaactggccccaaaccctgtcagcaaaggccgagtggaagtcaagatatgtaccgcaacctggaagtcataaggtacacttctcccctttcccagccaacatggtgtcagagaaggctgcctggggagctggggttttccttccctccaggaggtgataacactcctttgccacggtgtcagtggtcacagggagcctgaacgtccacctaataatacataggcatctctctggctcctatgggggtaatgtcagagaagaggcctagtagagaatccagactgttgctggcatccagcagtaacaaggacacctccacaatgtccgtggaggccacgtggggatcagtaacaaggcattcctctccctcccagtcagatgtcagtggaagactaggggactagaactcccgtgtgcattcagcagtaatgcccatgaccaccactccgtgttatcacaggccttgaagaagcctgaactttcactcccctctggttgtagtgaggtggcactccctttttcctgctgccagtgctgtgtcagaggaggcttgccaaattggaagatgtaaataagattcacattctcataacgtaataccccaaattttcaagattcaattgaaaatcactaagccgggcacggtggctcacacctataatcccagcactttgggaggccgaggtgggctgaacacttaaggtcaggagttcaagaccagattggccaacatggtgaaaccccatctctactaaaaatacaaaaattagccaggcatggtggcgcatgcctgtaatctcagttactggggaggcggaggcaggagaatcactgaaacctgggagacagaggctgcagtgagccaagattgcgccactgtactccagcctgggcaatagagcaagactccatctaaatttatgtcatggagtcccagaaggagaggagaaagagggtggggctgaaaaaatattggaggaagaagtcatggctgaaaaattcccaaatttggcaaaagtcagaaacctatggattgaaaaagctgaatgaagttcaaatatgataaactcaaagaaattcacagagacatatcatagtcagatttctgaacactgcagacaaaaaatgaagatcttgaaattagcaagaaacgaccttacctacagcaatttgaatgacagcagatttcccatcagagatcataaaggccagaaggaagggatacatacaacaatttttctagtgctgaaagaaaatatctctaggctgggcacggtggttcacacctgtaatcccagcacttttggaggctgaagtgagaggatcacctgaagtcaggagttcgagaccagcctggccaacatggggaaaccctgtctctactaaaaatacaaaatttagctgggtgtggtggcacatgcctgtaatcctagctacttgggaggccgaggcaggggaattgcttgaacctgggaggcgaaggttgcagtgagccaaggttgggccactgcactccagcctgggcagttgagtgagactccgtctcaaaaaaaaaaaaaaaaaaaaaaaaatttagccgggcttgttggtgggcacctgtagtcccagcactcaggaggctgaggcaggagaattgcttgaactcgggaagtggaggttgcagtgagccaagcttgtgccactgtactccagcctgagtgacagagcgagacctcgtctaaaaaaacaaaaacaagaaaacaactctaaacccagagttacacatccagagaaatatccttcaggagtgaagggaaaattaacaatttttcttcagcagacctaccctaaaagaatggctaaaggaatttctctaaaccaaaaagaaatgataaaagaagtaattttggaacatcaggaaggaagaaagaacaataaaaagagtaaaatatgggtaaacagatagactttaccctccttttgaattttctaaattgatggttgaagcaagaattatagcactgatttgtttttcagtatatatactggaaatatttaaggcaattatgttacaaatgaaggagggtcaaagtatataaagggaggtaacctttctatatttcttttgaattgatgcaggcactttggaaagtaatttcactatttgtttaaaaacgtaacataccctgaccatatgacatagcatctatactcctgggcatttgtcccagaaaaacagaaatttatttatttaatttaaaattttttttttcagtattacactccgtaagtgctgtaattagcacttagagaggccaaggcaggcagattgcttgagcccaggagttcaagaccagcctgggcaatgctgcacaatcaaaaaagaaaaacagacatttagaaaactattttaaatgtctttaattgctgaatgcctctttggctaatatttgtaagatccttctcctcctcctcctcctcctcctcctcctcctccctccctccctcctcctccctccctccttcttcttccttcttctggcagagtctcactctgtcacccaggctggagtgcagtggcgtgatctcggcttactgcaacctctgcctcctgagttcaagcgaatctcctgcctcagcctcccaagtagctgggactacaggcgtgtgccaccatgactggctaattttttgtattttcagtagagatggggtttcaccatgttggtcaggcaggtctcgaactcctgacctcgtgatccacccgcctcagtttcccaaagtcctgggattacaggtgtgagccactgcgcccagcctggaagatcattatttagacctacaactgatgcattgttccactgacacaattgcccaggctggtcttgaactcctgggctcaagcagtctgcctgccttggcctccctaagtgctagtattacaggcttgagccactgtgcccagccaaaaatagaaatttatattctcacaaaaacatgtacatgaatgtttatagcagctttacttgtaataatcaaaaactggaaatgaccaaaatgtcctacagtgaaacaaactgtagtacatccatagcatgtaatactctactgtcaggattaaaaagaaaccaactgttggcacaggcagcaccgtggctggatctcaggggcattatgctgagtgcaaaaaagcctcaaagggtcttatactgtatgattccatttgttcaacgttctaaaaatgacagctgtatagagatagagaacatattagtggttgccgctagttagagaaagtgggtgaaggagaggtgggtgtgaatataaattgataggagggagatctttgtggtattataacacttctatgtcttgattgtagtgctcatggttacatgaatacacatgtgtgataaaatgccatgtagaactacatataacattgtgccaatgtcactatctaggttttagtttgatctttagttacgtaagatgtaactgttgggtgaaattgggcaaaagaatacccgaaacctctctgaaatatctttgcaacttcctttgaattgacaattatttcaaaatagaaagttgggtttttgttgtgtatatcaacatgagtatatcaacatgaattgttgatatacacaacatgagtatatcacaacatgagtatatcaacatgaactgctgatattgttgatatacacaacaaattggtgatatacacaacaaatcccaaatgcattacactaagtgaaagaagccatattcaaaaggctacatatctactgatgccttttatatgacatgcaggaaaagatgaaactgttggacagagaatatactgttggctagctgggattaggaattggggattgaccacaaaggggcagcatgagggagttttctggggcaatggaatggttgtatatcttgacagtgtatttgtcaaaatatatagaactataaaagtaagttttgctttatatgcattaaatcaaaaaaagaaactcgtgctcaaatagaaatacattttctgagagcttaccttttgatgactttgagaattttctggaaattttaaagaaatgtggttttgtttcccaacaggtgatgctatgggtgaagaagacatgcttcaggcagctgtgaccatgtctttagaaactgtcagaaatgatttgaaaacagaaggaaaaaaataatacctttaaaaaataattgagatattcatactttccaacattattctgtgtgattacagcatagggtccactttggtaatgtgtcaaagagatgaggaaataagacttttagtggtttgcaaacaaaatgatgggcaagtggaacaatgcgtcagttgtaggactaaataatgatcttccaaatattagccaaagaggcattcagcaattaaagacatataaaatagttttctaaatgtttctttttcttttttgagtgtgcaatatctaacatgtctaaaattaggggcatttttcttggatctttttgcagaccagctaattagctcttgcctcaggctttttccagttttctttttctctcttgtagataatttggctcacatcatctaatagtgactttcatttcttattaaccaaattaacctttcaggaaagtatctctagtctgtgttgataatagtaatggttctagaaggataaacagtcctcccttcaactgtatactgtgtgctccagtgttttcttgtgttattttctctgatcacaacttttctgcgacctggttttcattattttcccacaattcttttgaaagatggtaatcttttctgaggtctagcattttaagtcctgtgatgggatcattatttcatgactggtgcattcctaaactctgaaatcagccctgcgcaagtacttgagaataaatgagcgttttttaaaatgtgtgagcatgtgctttcccagatgctttcccagatgctttatgaatatcttttcacttacatcaaaaccttacagctttgttgcaaccccttcttcctgcgccttattttttccttctccaattgagaaaactaggagaagcatagtatgcaggcaagtctccttctgttagaagactaaacatacgtacccaccatgaatgtataatacatgaaatttggccttcaattttaatagcagttttattttatttttttctcctatgactggagctttctgttctctttacagttgagtcatggaatataggtgtctacttcacatcttttagtaggtatagcttgtcaaagatggtgatctggaacatgaaaataattaatgaaaatgtttaaatttatactgtgatttggcacttgcatcatgtttagatagcttaagaactgtagaagtcatagtacttagtgggtctgtaaataagaaagtccatagttttgataaatattctctttaactgagatgtatagagagtttcttgctgggtcaataggatagtaccattttggtgaaaaccgtgtctctctgaatttgatgttttagtttctgtgttccccatccctcattctccagccccttttgaagctcttttgaatgttgaattgttcataagctaaaatccaagaaatttcagctgacaacttagaaaattaaagtatggtatattgccctactggtgtgtggctgcacacatttcatcagggaaagttttttgatctaggatttattgctaactgaaaagagaagaaaaaatatcttttatttatgattatgaaatagctttttcttggatataacagattttttaagtcattattttgtgccaaagttttctgaagtttcccttacacaaaaggatagttttattttaaaatctaaagttttcttttaataattaaaaatgtttcagaagaattataaaactttaaaactataagagatgttagagtttagtactactccctcaagatttaaaaagctaaatattttaagactgaacatttatgttattacaggtgtgttagtcatattttccatggatatttgttcattacctttttccactgaaaagttacgttaaacttttcatacacttgaattgatgagctacctaatataaaaatgagaaaaccaatatgcattttaaaattttaattttagcgtttataaagttcatatataccctagttaaagcacttaagaaaatacggcatgtttgacttttatttgctagagaggtttttttggttgtttttgtttttgctttttttgagacggagtctcgctctgttgcccaggctggagtgcagtggcgtgatctcggctcattacaacttccacctcctgggttcaagcgattcttctgcctcagcctccagagtagctgggattacaggcgcccaccaccatacccagctgatttttgtatttttggtagagacatggtttcatcatgtttggccaggctggtctcgaactccagacctcaggtggtctgcctgccttggcctcccaaaatgttgggattacaggcatgagccaccgcgcctggccagctggagagtttttaaagcagaggtgagcacacactggatgcgtttgaatgtgtttgtgtagtttgttgtgaaattgttacatttagcaggcagatccagaatcactagtgaactgccatcttggtggggttggcttaaatgtaattgaatgtttagattctatttcttaattgattggccagtatgaaaatatgccagtgcaagtaaccatagtatcacaaaagttaaaagttatgcaaagctatagcttatatatcaggtactgccatttactgtaaaccacctgcaagaaagtcaggaacaactaaattcacaagaactgtcctgctaagaactgtattaaagatttccattctgttttactaattgggaacatcttaatgtttaatatttaaactattggtatcatttttctaatgtataatttgtattactgggatcaagtatgtacagtggtgatgctagtagaagtttaaataagccttggaaataccactttcatattttcagatgtcatggatttaatgagtaatttatgttttaaaaattcagaatagttaatctctgatctaaaaccatcaatatatgttttttacaataatcaacatataaatatttcagtaatataaactgtttgaaaaggctgctgcaggtaaactctatactaagatcttggccaaataatttacaattcacagaatattttgtttaaggaggtgctttgtttttgtccttaaaacttgatttttcttaaggctttattcatgatgccaaagccaatgaggaaaaaaactcaaaaccagttgagtatcattatagacaaaactaccagtagtccatattgtttcatttaatattaagttgaataaattttattccagtcagagcctaaatcacattttgaatgtctgaatttttgatactatttttgaaatcatgctagtgccggccgggcgtggtagctcacacctgtaatcccagcattttgagaggccaaggtgggtggatcacaaggtcaggagttcaagaccagcctggccaagatggtgaaaccccgtctgtagtaaaaactacaaaaattagctgggcgcggtggcaaggtgcctgtaatcccagctacttgggaggctgaggcaggagaatcacttgaacctgggtggcagaggttacagtgagccgagatggtgccattgcgctccagcctgggcgacagagtgagactccatctcaaaaaaaaaaaaaaaatcatgctagtgccaagagctacgaaattcttaaaactcttaaaactggcccattggacttgtacaaatacaaaatagattcaatgcataatcaaaatattttaaaatcttaagtagaaaaataaatcttgatgttttaaatttttaggaggattcgataattaatattgatgacctccaggctgggcacagtggctcacgcctataatcccagcaattcaggaggctgaggcgggcagatcacttcagggcaggagttcaagaccagtctgggcaacatggtgaaacttcgtctctactaaaactacaaaaattagctgggcgtggtggcacacacctgtaatcccagctactcaggagactaagaatcgcttgaacctgggaggcagaggttgcagagagccgagggctcaccactgcattccagcctggcgcaatagagtgagactctgtctccgaaaaaaaaatatatatgtatatgtgtatatatatatgtgtgtgtgtgtgtctctactaaaaatataaaaattagctgggtgtggtggcgggcacctgtaatcccagctacttgggaggctgaggcaggagaattgtttgaacccaggaagcggaggttgccgtgagctgagattgtgccattgcactccagcctgggcaatgagtgaaactcttgtcttaaaggtttttttttttccttgggctactattttctctttctttctttcttttctttcttcctttctttcctttcttttcctttgtttgtttgtttgtttttagtagagacggggtttcaccatgttagtcaggctggtctcaaactcctgacctcaggtgatccgcctgcctcagcctcccaaagtgctgggattacaggtgcaggccaccatgcctggccttgggctactgttttcaaagtgaattgtttgttgtatcgagtccttaacaagtatagacatatgatatatgtgatcctaattaagaaataccagattggatcaactaatcatgtcagcaatgtaaataactttttatttttcatattcaaaataaaaactttcttttattcctggtccctttataaccagcattttttgctttgaaaaatgagctggctttgtagttttttaaagttttaaacataagaaaaatgtcttttgttctatttgctttcatgaatgaagatcattgacatggttggtaaattctagaattttgattttgttttttaatttgaagaaaacctttgctatttttattttttccaaatggtctgacattttaagaatgaatgctaataacttaacttctaaatttatcgtcattggcatgtttaatagcatatcaaaaaacattttaagctggtggatgcatagacaaagcaatgggaaactagtgaaatacacacggatgttcctgaggcacttaggaagctctcagttgtctcttacatagttcaaggaatgttttctgaatttttttaatgcttttttttttttgaaagacaaaaacatacattttaaatgtgattatctaatttttacaacactgggctattaggaataactttttaaaaattactgttctgtataaataaaatatttgaaattcaagtgcagaaaatatctgaaacaaaaagcattgttgtttggccatgatacaagtgcactgtggcagtgccccttgctcaggacccagccctgcagcccctctgtgtgtgctccctcgtaagttcatttgctgttattacacacacaggccttcctgtctggtccttagaaaagacgggcttccaaagcactgttgaacactgaggattctgttgttagtgtggatgttcaatgagttgtattttaaatatcaaagattattaaataaagataatgtctgcttttctatttccttttgaatttgtgtttattgttaattcatagctattcaaagtatgattagagctgagctttgtggcttgcatctgtaattccagctacccaggaggcagaagcaggaggattgcttgagcccaggagtttgagcctgcagtgagctatgatcttgccactgtaattctagcctggtcgacaaagcaggaaaaaagtgtggatggaggaccagcaacatctgtatcacctgtgagtttttcagaaatgcagagtttcaggccacactcagacctactgaatcagaacttgcactttttgcaagatccccaggacactgaagtgtagagtgaagcttgagaagcacggttttatggattgttcttaaccagctgtggtggtgaatatgagtaacgcaggccagcacagtccattgatattctattccagcttactgcctgccaaaaggtccattattactggatcccgagtcttttccaagagaagctaagaattccaaatttttatttgaaatatatttttaaaatggttgctcaattggcagggtgccagtggctcatgcctttaatcccagcactttgagaggccgaggtggaaggatcacttgagcccaggagttcgagaccagcctgggcaacataaagagaccccatgtctattaaaaaaaaaatagagacagaatgctgccttaaaaaaatcataaatgtttgctcaattgatttttaaccctgagggccaaacaaagcacattagtagcaatttttaagagtgctgtttttcctcattgtatctaactctggacaccagaatccaaatgtaatgattggactccacctagactgattgaggaatatattgtcttcacatttagggttgtctattcattttagctttaattaggattgggcacaaattttgaaacataatatgttacaggacagggatcccgatccagaccccaagagggttcttggatcttgtgcaagaatgaattcagggcaagtccataaattgaaagaattgaaagccagttcattaagaaagtagaggaataaaagaatggctaccccataggcagagcagccctgagggctgctggttgcccaccccgcccccccccctttttttttttttgagataatctcgctgtgttgccaggctgtagtgcattggcatgatctcagctcactgcaacctctgcctcctgggttcaagcaattctcctgcctcagcctcctgagtagctgggactacaggtgtgtgccaccatgcccagctaatttttgtatttttagtagagacagggtttcaccatgttggccaggaaggtctccatctctttaccttgtgatgcacctgccttggcctcaaaaagtgctgggatgagcaacctcgcctggctggttatttcttgaggatatgctaaacaaggggtggattattcatgcctcccctttttagaccatttagggtaacttcccagcattgctatggcatttgtcaactatcatggtgcttacgggagtgcagcagtgaggaggaccagaggtcatttcatcgccatcttggctttttcagctggcttctttactgcaacctgttttactagcaagtttttttatgacctgtatcttgtgcagaccttctatttcatcctgtgacttagaatgccttaaccatctgggaatgcagcccagtaggtctcaggctcattttacccagcccttattcaagatggagttgctctggttcaaacgcctctgatatttccctactcccttttataagacaacccttaatcctaagggttgcagagggatgaagatccatcttctgtaacttcttcaggctgaataagggtgatgatattcctgcctatgagagtctcttgtattagggtagaaaggagctcagtcagtatggctctctatccttcctcccttccccagcccctgacaactaccattctactttgtctctgtaattctaagtatctcatataagtggaatcattcagtatttgtagggttttttttgtgactagtgtatttcactttgcatgtcaaggttcatccatgttgtagcatatgtccgaattttcttctttttaaaagctgaataatattccattgaatgatatatgcacattttgcttattcatttatccatcaaagaaaaccaatagcttttttacataccagtaacctggttaaaaaaaataagatggaaaaataccaagcccaaaaatgtcaaattgttgaacaccagagaggtactataattcaagctgagcagaaaggaatggcccttgtctcagccctgagccacatgtcactacatgggccccaagcagctcttcttgtgctcagagtcctgctaagtcttgttctgcactcctctaaagtggctcaaactagcacaggaggccaggagggagcagattctatgccacctccattgcttctgcgccttctccagatccattttttccaaaagctgtgtttgaattctgcacaggggcaggggcatctctgtctccaacactgaaaccccttttaccagacccagagaagactgcctttttttttttttttttttttttttagacggggcctcgttctgtcgcctaagctggagtgcagtggcaccatctcggctcacggcaaactctgcctcctgggctcaagcaattctcctgcctcagccacctgaatagctgggattacaggtgcgggccaccacctccagctaattttgtatttttagaggtggggttttgccatgttacccaggctggtttagaacttctgagctcaggtgatccacccgccttggcctcccaaagtgctgggattacaggcatgagccacctaacccggccagatttaactgctttgaaccaccatctcacacatcttccaggggcttctagttaaatacagagtattaatagtgtataattccatttatgtaagatccttggaatagccaaactcacagagacaaaaagtagaatggtggttgccgggggatggtagaggggaaaattgggagtcatttaacgagtatggagtttcagtttaggaagatgaaaaaagttctggagatggatagttgtgatggctgcacaacaatatgaatgtacttaatgtcggtgaaccgtataaccatttaacaattgaaaatggttataaaggtcaattttgtgttatgcatatcttatcacataaaaaatacagaggactgatcattatatttgctcccttccaaaatcccacctaggttaaagaaaaatatataaacccacaagaacacagggaccaggagaggagatgcattcattggattaggtttggttgtaaaacaaaaacaaaaacaacaaaaacaaaaaaaaacacctgggcgcgatggctcacaccttgtaatcccagcactttgggaggctgaggcaggcagatcacaaggtcaggagttcgagaccagcctgaccaacatagtaaaacctcatctctactaagaatataaaaaccagccaggtgtggtggcatatgcctgtaatcccagctactgaagttggctgagacaggagaatcacttgaaccagggaggcagaggttgcagtgagctgagatcgtgtcactgcactccagactagatgacagagcaagactccgtctcaaatggaaacaaaaactaatataacagtgactttacatgctatgggttttttttctcctctcatcttcaagaaatgcggagacggccagtccagggatgatacagcatcacagtgtcaggaatctgctctttctgtataattgttacaggaaaggggtcccgatccagaccccaagagagggttcttgaattcaggccaagtccacagtgcaaagtaaaagcaagtttattaagaaaggaataaaaattccctactccatagacagagctgcccggagggctgctggttgcccatttttatggttatttcttgatgatatgctaaacaaggggtggattatttatgcctcccctttttagaccatatagggtaacttcctgatattgccgtggcattcgcaaactgtcatggtgctggtgggagcgtagcactgaggaggaccagaagtcactcttgtgtggcctttttggtttggtgggttttggccagctcctttactgtaacctgttttaacagcaaggactttatgacctgtattttatgttgaccttgtatctcatcctgtgacttagaatgccttaaccatctgggaatacagcccagtaggtttcaacctcattttacccagctcctattcaagatggagttgcggcccggcgcggtggttcatgcctgtaatcccagaactttgggaggttgaggtgggtggatcacgaggtcaagagttcaagaccagcctggtcaacatggcaaaaccccgtctctaccaaaaatacaaaaattagccgggcgtggttggcgtgtgcctgttatgccagctacttgggaggctgatgcaggagaatcacttgaacccaggaggcagtggaggttgcagtgagcagagatcgcgccatgcactccagcctggacgacagagcaagactgcgtcttggggaggaaaaagaagaaaagatggagttgctctggtttacattcctctgacataatggctttatgtacatggcttccatggttaaggtcagctcgtggatctgatatggctgtgttggtgatcatgcccagcaatcagaaagagaagggaggccgggtttggtggctcatatctgtcatcccagcacttcgggaggccaaggcaggaggatcacatgagcccatgagtttgagaccagcttgagcaacatagggagacctcatctctacaagatataaaaaaaactgtcggacatggtggcgtgtacctgtggtcccagatattcaggaggttgaggtgagaggatacctggaacctggaggtttgaggctgcagtgagctataatcgcgccactgcactccagcctgagcaacagagtgagaccccatctcaaacaattaaaaaaaaaaaaaggagggcagaaaaagtctatgtaccttttctttcaggttaccttctcaaagttgtgcataccccttccatttacattatattggccagagcttaacatgacaactactagctacaaggtggtttttattctgggttgccatgcatcttagcttgagtaccctacaggcagatcctgagacgaggattcctgtgaaaatgattatttacttatttaattaatttattttgagatggagtctcactctgtcacccaggctggagatcagtggcatgatctcggctcactgcaacctctgcctcccaggttcaagcaattctcctgcctcagtctcccaaatagctgggactacaggcatgtgccaccatgcccggctatttttttttttttttttttgtatttttagtagagacagggtttcactatgttggccaggctgatctcaaactcctgacctcaggtgatctgcccgcctcggcctcccaaagtgctgggattacaggcgtgaaacactgcgcctggccgaaaatgattttttaaaagtgttccaggaagaaacggaaagggcataggggagtaagaaagtggaaaatggaaaggaaggaagccaagcaaggggatcctatcaagcaaagcctcagtcctgcagacagtttggaggcaggatattcacatcttagagttgtccaaaacaggacaggcaagctgcagaattttcaactctggctgaataaggttgcgtttcagctctccgggcacctggaaagtatgggctccagtagcctggaggcagtctgctgacagacacaggtgctggctggtgtgcacaaaagtggtaaagggatgagcgggtgcaatagggacactggcatcttggctgtcatgcatccaggtaaaaagtgggggctcaattactatatatgaaagggagaacagactttaaggaataattatcagtcatttccaggtgagacagcaacagaagagaaatgctaaattttcccttttttgggggggtgcggtggggggacagagtttcgctcttgttgcccaggctggagtgcaatggtgcactctccggctcactgcgacctccacctcctgggttcaagcgattctcctgcctcagcctcctgagcagctgggattacaggcatgcaccaccatacccagctaattttgtatttttagtagagacagagtttctccatgttggtcagagtggtctcaaactcccaacctcaggtgatccgcccgccttggcctcccaaagtgctgggattacaggcatgagccaccgcgcccagcgagagatgctaacatttttttgttttttggaagatgacaagttgatgcaagaatgagcagaaccaggaagctggatactcagtgtttaagagttcctagcaatatgcaggaaaggaaagcaacaagtatcccgggaggtggggttagatgtagactgaaatcaggaggtgtggttaaaactctttgaaagaggctgggtgtggtggctcatgtaattccagcactttgggaggccaaggcaggtgatgacgaggtcaggagttcgagaccagcctgaccaacatgtgaaaccccatctctactaaaaatacaaaaatcagccaggcgtggtggcgcatgcctgtgatcccagctactaaggaggttaagacagaagaattgcttgaacctgggaggggaaggttgcagtgagccaagatcatgccattggactccagcctgggcgacagagagagactccatctcaaaaaagaaagaaagaaaaaagaaacagcagattccctagagaggagacattcatcactaaaaaaaaatatatatatatatatatagagagagagagagagttaaaataattcgcagaactaaaagacctttttgaatgggctcagggtgcccagcataatgtacgaaacaaaagcaaacccacatcaaagtacaccattattaatttcagagcatcagaaataaagagaagatctgataagcttcttggaagaaaacaaggcacagagaataatcagaggagagtagagcaggaaaacagggtcctgggtagagagaactgagtctagccaattgatagaattcttgatgttttgttgaaaacagaagcactttataattctctgggtaagttttagaaagattctgtagtaatggtaaattgtgcaaatttaaaaaatggaacctgttaatttcaggaagaacaaaaggtagaaaaggcaatataatcttggtacaacatttgactcagctgcaatgaataagacttacatagtcatataaggtaagcattgattacttactttaccaataattatgatatcaccatactgaaagcccagaagcaagggaaataaagggaaataccagagtgctaaatctttttttttccgtaagttggtaatgtataaaataataaaatgacaatcataagcctaatgcttagaaattcagaaaaatatcagactaaattttaaagtctactttaaaactgagtttttgctttatagtttcataaataaattcattttgatggttttctcagaacagatgaactggctgagtaaagtggttcatgcctgtaaccctatcactttgggaggccaaggcggatggatcacttgaggtcaggagttccagaccagccaaaaaattagctgggcacagtggtgcacacttgtaatcccagctactcagtaggctaaggcaggagaatcacttgaacctggaaggcgaaggttgcagtgagctgaaattgaacaactgcactccagcccgggcgacagagtgagactccatctcaaaacaaaaaacaaaaaacagatgaattgtttttccttaaggaatactgatgatcccactgcttgagtaatggaaagcagcttgcagctaataagttattttttgtcttttttcctgttctatccattgtcctgggtttgaaatttcagctgggcagctttgatcccaccacctgtagccactgaggttcataggctgtttgagatattatgttcaattgtgctgggtttgttttgctgcttaatgagtgatgaagagcaatgtattcgctactgagatattctgcagaaaaaggaagagatgtcttcagctcaaatgctatcaaacttgtatgtcttttaactttttattataaaaatttcaaacatatgcaaaagcaaaagacttgttcaatgaaccttatgtacccaccacccagcttcaacaattatcagttcctgacaattcttgtttcacctaccccacctctattatacacacatacaaacacacacacagacacacacacacgggagcaaagtcaacttccattattttgaagcacatccaagacatcacatcgcattatttatcacattatttattaagtttcttgggtcatagtctatctcacagaaagaaatcccccatgagaaacttttaggacatagcttttatgttaattacttaatttctgcactagccatccttgccttccttctaattttctgcactagctatccttaccttccttctaatttactaacctgccaaggattctcctgcctcaaagtatttgcatcagctgtttctttctgcctggattgctctttcccagatacttacatgtctcattctttttcacccaggtgaaataaacagccttgttgctcacacaaagcctgtttggtggtctcttcacatggatgtgtgtgacatttggtgccgacaacctgacaggaggactcctctgggagaccggtcccctgtcctcgccctcactccatgaggagatccacttgcgaccttgggtcctcagaccaaccagcccaaggaacagctcatgaatttcaaatcaggtaagcggtcttttccagcctctcttgctacccttcagtctccctgtccttccaattccagttctttttcctctctagtagagacaacagagacacattttatccatggacccaaaactctggcgctggtcacagactcgggaagacagtcttcccttggtgtttaatcactgtggggacacctgcctgatttttcgctcacactccattggtgactgatcatcggggggcacctgccttggtcattcacccacattcccttggtggcaagtcaattgcggggacgcctgctttggctgctcacccacccccttttctgtgtctctacctttctctttaaacttacctccttcactatgggcaaccttccgcccgccattcccccttcttctcccttagcctgtgttctcaagaacttaaaacctcttcaactcacacctgacctaaaacttaaaagtcttattttcttctgcaatactgcttgaccctaatacaaactcgacagtagttccaagtggccagagaatggcacgttcaatttgtctgtcctacaggatctagataatttttgttgaaaaatgggcaaatggtctaaggtgcctgacgtccacacattcttttacacattggtccctccctagtctctgctcccaatgtgactcgttccgaatctttcttctttctctcctgtctcttccttcagtctccaccccaagctctgagtcctttgcgtcctccttttctacagattcatctgacctctcccctcttccccaggctgctcctcgctaggctgacccaggtcccaattcttcctcagtctccactcccccaccctataatccttttatcaccccctcctaacatcccatctggcttacagtttctttccttgactagccctcccccacttgcccaacaatttcctcttaaagaggtggctggagctgaaggcatagccaaggttaatgctcctttttctttatccgacctctcccaaatcagttagcgtttagactctttttcatcaaatataaaaactcaaccctgttcatggcctgtttggcaacaacccttagatgctttaccaccctagacccagaagggccagaaggccgtcttattctcaacatgcattttattacccaacccactcccgacattagaaaaagctccaaaaaattagattctggccctcaatccccacaacatgacttaattaaccttgccttcaaggtgtacaataacagagtagaggcagccaagtagcaacatatttctgagttgcaattccttgcctccactgtgagacaaaccccagccacatctccagcacacaagaccttccaaatgcctgaaccgcagtggtcaggcattcctccaggaccgcctaccccaggatcttgcttcaagtgccagaaatctggccactgggccaaggaatgcccgcagcccaggattcctcctaagccatgtcccatctgtgcaggactccagtggaaatcggactgtccaacctggcagatactcccagagcccctggaactttggcccaaggctctctgactgactctttcccagatcttctcggcttagcagctgaagaccgacactgctcgattgcctcagaagccccctggaccatcacagatgctgagctttgggtaactcttacagtggagggtaagtccatcccctgtttaactgatatgggggctacccactccacattaccttctctttaagggcctgtttcccttgcctccataactgttgtgggtattgacagccaagcttcaaaaccctttaaaactcccccactctggtgccaacttggacaacattcttttatgcactcttttttagttatccccacatgcccagttcccttattaggctgagacattttaacctagttatctgcttccctgattattcctggactacagccacatctcattgccaaccttcttcccaacccaaagcctcctttgcgtcttcctctcttatcccaccttaacccacaatgggacacctccactccctccctggcaactgatcaaacacccattactatcccattaaaacctaatcacccttacccggctcaacgccagtatcccatcccacaacaggctttaaggggattgaagtctgttatcactcgcctgctacagcacgggcttctaaaacctataaactcttcttaaaattctcccattttacctgttcaaaaaccagacaagtcttacaggttaattcaggatctgggccttatcaaccaaattgttttgcctatccaccctgtggtgcccaaccccgtacactcttttgtcctcagtaccttcctccacaactcactattccattcttgatcttaaagatgcttttttcactattcccctacaccccttgtcccagcctctctttgcttttacctgaactgaccctgacacccatcagtctcagcagcttacctgggctgtactgccacaaggcttcagggacagccctcattacttcagccaagctctttctcatgatttactttccactccttcgcttctcaccttattcaatatagtgatgacgttcaactttgtagcccctcctttgaatcttctcaacaaaacaccctcctgctccttcaacatttattctccaagggatataaggtatctccctccaaagctcaaatttcttctccatccgttacctacctcggcataattcttcataaaaacatacatgctgtccctgcctatcatgtccaactgatctctcaaaccccaaccccttctacaaaacaacaactcctttccttcctgggcatggttggatatttttgcctttggaaacctggttgtgccatcctaacaaaaccattatataaactcacagaagcaaacctagctgaccccataaatcctatgtcctttccccacttccctttccattccttaaaaaacagccctaaaagctgctcccacactagttctccctaactcatcccaactcttttttcattacacacagccgaagtgcagggctgtgtggtcggaattcttacacaagagccaggactgtgccttgtagtctttctgtccaaacaacttgaccttactgttttaggctagcccccacattattcctgataccacacctgatccccatgactgtatctctctaatccacctggcattcactccatttccccgtatttccttctttcctgttcctcaccctgatcacacttggtttactgatggcaggcctaattgccattcaccagcaaaggcaggctatgctatagtagtatcttccacatctatccttgaggctaccgctctgcccccctccactgcctctcagcaagccgaactcattgccttaactcaagccctcactcgtgcaaaaggactacctgtcaatataaactgactctaaatatgccttccatatcctgcaccacaatgctgttatatgggcagaaagaggtttcctcactacgcaagggtcctccatcattaatgcctctttaataaaaactcttctcaaggctgctttacttccaaaggaagctggagtcgttcactacaggggccatcaaaaggcatcagatcctattgctctgggcaacgcttatgctgataaggcagctaaagcagcagctagcgttccaacttctgtccctcatggccagtttttctccttctcatcagtcactcccacctactcacagactgaaacttccacctatcaatctcttcccacataacgcaaatggttcttagaccaaggaaaatatctccttccaacctcactggcccattctattctattgtcgtttcataacctcttccatgtacgttaaaagctgctagcccgtctcttagaacctctcatttcctttccaacgtggaaatctatcctcaaggaaatcacttctcagtgttccatctgctgttctactactcctcagggattattcaggccccctgccttccctacacatcaagctcggggatttgcccctgcccaggactggcaaattgactttactcacatgtcccgagtcaggaaactaaaatacctcttggtctgggtagacactttcacttgatgagtagaggcctttcccacagggtctgagaaggccacgtggtcatttcttcccttctgtcagacataattcctcagtttggccttcccacctctatacagtccaataatggaccagcctttactagtcaaatcgcccaagcagtttctcaggctcttggtattcagtggaaacttcataccccttactgtcctcaatcatcaggaaacgtagaacggactaatggtcttttaaagacacacctcaccaagctcagcctccaactttaaaaggactggacagtatttttacctcttgcccttctcagaattagagcctgtcctcaagatgttacagggtacagtcgatttgaacttttaaatggatgcagtttcttgctcggccccaaccttgtcccagacaccagccctctaggtgacaatcttctagtcctcc

SEQ ID NO: 3 - DNA, 39346 bp, mmusculus
ggcggaccggggctgaggggtggggccgggggcggagctgctggagggggctgctccgcgccggggccgttggctccagacaaataaacatggagtccatcttccacgagaaagtgagtgtgggcgttcggtggggagccgtcctcggctcggcggcgggcgtggggagcagcgacgccgcttcaggaactcaggcggggcccgagcgcccccatcccgacctggctgggtgaggggtgcttcctgccttctccccatggctccgctcgtgaagcctcccgcatgcgttcccggcaccctcgccctagaagaccgggcgggtagcctgggcatttcggggggcttcacccggaggattagcgcgggcgttccttgtccacttgccacaccttttcgggtttcttctctcttctctcttagggtctagtctagcgagtcgccttttcagcacctggcggacccttcccaactccacccacgccccctaacctgtcctctggcagatccaactttctctctcaactcagttctataatggaatgctccatgcatttagatcttgattatccatcccacgtctttctgcagttgtgaccgtggctttcccattaaagggcctgacacttcggaagtaaagtaggaaaccccggagggaagtcgtcataagagtttttattacggggatgtttgggttgttctcccatttttccggaccaggaggccagctttgtttttaggtattatggatagattagaatcgttctactgtgtgatttggcttagtctcttcctcaccttaattcctaagtgactacgcttaaaagtattgctgtgacatcttgagaaactggtctatgttcgcatacaattatcaagtcatttgggtgtttctcggacaaccatgtttcataatcattttaggtttggagagggttgctagttgagactattatttcgttgggagcaaaggcctttgtttttatcacttgtaaaggagcattgactcatagtgtttaaaatccacgcacaacaaaaagacaaaaatgatgtgaatctaaggacgttgttaaatgaagtgctcttaagaagacattttgagtgttttggaactggaacaagttagtttgtgacaggatttcttgtagcccaagttggctccagactcccatcgtcctgtctctgcctcctgagagctggctgggatgatggccacgtgctatgactgagtgagctccccctcccggccccctccccacattcatttgtaattaattttccaaaggttttggaataagacccattttaaacatgttatattttgaacactgtatacactgcttcatgagactcttgccattcattctatttaaaaaaaaaagttactgtttgtgtgtatgtgctggtgtggaggtcagggaggactttataaagttctctcttcccaacttggtgtgagttccgggtgtctcaggctcttagcaagcccgtttactcactgagtcatctctagggtgaatgaaaaaagaaatgggaaggacatgacttttcctagggatggcggaggagaaggtttattaaagagatttgggagagcagagccaggggcagacatatttgggagaacccagagtggtcttgaccctgaggggaagggagaaaagggaaggaaatacagcagccaggagccaaagttgcaaaccatacaaaaagagggtgggtaaccaaaatgtatggattacataggcaagagccactaggggaagggcagcatagtccatgctctggagagttcagggtagagggccgggtataccagccataccctgtaacaggagggactaagggatgctgggacaacctggaggccaggtccacttccatatgttaaataggtacctcagccactaagcctgggattaaaacttaacatagggcacttaaacaatgcattaaaaaattatttttggccagcaatggtggtatacctgtttttgatattttatttatttacattttatttatttattttggtttttcgagacagggtttctctgtatacccttggctgtcctggaactcactttgtagatcaggctggcttcggactcagaaatccgcctgcctctgcctcctgagttctgggatcaaaggtgcacgctaccacgcccagctatttacattttaaatgttatcccattttctggttcctctctacaaactcccaatcccatccccccccaccctctgcttctatgagagtacttccccccaccactcccgcctacccgctctggcattcccctacactggggcatcaggccttcacaggaccaagggcctctcctcccattgatgccctacaaggccatcctctgctacagctggagccatgggtcgctccatgtgtactctttggttgatggtttagtccttgggagctctgggtgtgggtgtggggtctggttggttcatattgttgttcttcctatggggctgcagaccccttcagcttcttcagtcctttctctagctcctccactggggactctgtgctcagtccaatggttggctgtgagcatctgcttctgtatttgtcaggcacagagagagttttaagatagccagggctatccagagaaactctgccattaaaatccaaaaaaaaaaaaaaaaaaaaaaaggtgtttgccagggtactgtgtgctcctagtgcccactaaagccagaagatctggaactggaggaactggagttaaagaggccacgtgagcagccacgtgggtgtgaggaattgaacccaggtcctctggaaaagcagccaatactctttgttttgttttgttttttgagacagggtttctctgtatagccctgcctgtcctggaactcactctgtagaccaggctggcctcaaactcagaaatctgcctgcctctgcctcccaagtgctgggattaaaggtgtgcgccaccaccgccgggctagcagcgaggactcttaactgctgagccatctctccatctcccccaataccttcttgacagtactgtttctcattggagcagatttcagtggaggtgactactgaattggtatatgcaaaatgctaggcttacaaagtgcttgtgagtaagcatggaagcccgagttcagatcccagtgtgtgttgtattcaccaatactcgaggcagggaatggacagacaagtgggtttctgggtgctgccccgtcagtcagtccagctgaatggtgagcactagactccactagaaaggtggagagcagctgaggaggacatctgacttagacctttagcacatgtatgaatacatctgcatgtacacatatacacaagaacacatatgcagacatgagtgcacagatacacatctgcttacccagaagtcattcagttatcagcaggtgtatatacttaataaatacttgagaagtacctttgccgtgtgtgtgtgtgtgtgtgtgtgtgtgtgtgtgtgtgtgtatgtgtatgggggtgcacatgtgcatatgcatttagaggcaggaagacaacattggtggtgttcctcacaagtaggttaacttaggacttccaggtatctgcccatttttacctctccagcgctatagttacagatgggtaccgccatgcatggctttttacatgaaggttctggggattaagctcagatcctaaggccagtatggcaagcaccttattgattgactaagctcagatcctaaggctagtatggcaagcaccttattgattgactaagctcagatcctgaggccagtatggcaagcaccttactgattgactaagctcagatcctgaggccagtatggcaagcaccttattgattgactaagctcagatcctaaggccagtatggcaagcaccttattgattgactaagctcagatcctaaggccagtatggcaagcaccttattgattgactaagctcagctcctaaggccagtatggcaagcaccttattgattgactaagctcagatcctaaggccagtatggcaagcaccttattaattgactaagctcagatcctaaggccagtatggcaagcaccttattgattgactaagctcagatcctaaggccagtatggcaagcaccttattgattgattaagctcagctcctaaggccagtatggcaagcaccttattgattgactaagctcagatcctaaggccagtatggcaagcaccttattgattgactaagctcagatcctaaggccagtatggcaagcaccttattgattgactaagctcagctcctaaggccagtatggcaagcaccttattgattgattaagctcagctcctaaggccagtatggcaagcaccttattgattgactaagctcagatcctaaggccagtatggcaagcaccttattgacagaggcatctccccaatcctggagacttcatttgcctttgtcattaatttaactgtatgaagcaagtgaacacttaatgaagtcatagcatatttcttttttcttttttttagatttctttttttaagcatttattactatatataagtacactgtagctgtcttcagacacaccagaggagcatcagatgtcattacggatggttgtgagccaccatgtgggtgctgggatttgaacccaggatctccagaagagcagttggagctcttaactgctgagccatctctccagcccgccatagcatatttcaagagaatgtacctgtgactgtagaagagaccagactgggaatatttaacataattgctattttccagagaattcttttcccttccataacttgcctttaaccagtaaattaactagagaagatatcaaccactttctcatggagttaattttacacttaacccctttgaatgcttccttttaaattagacataaaagcagttgtcagccaggcatgatagcatatgcctttaatcctagtacttgggaggcagaggcaagcaggctccttttgtgatttttttttagattatttggaagagtggaagtgtagtgtgttcatcttctgagcctagcacagtaaaatgtggattccccaactcatagaattttaatagcaaagagagtttctcttgtgtgaaatagaaaagtgttttattatattgtatcgcatatgtatgtaggggttctccatgcatgccactgtgtacatacggaggtcaaaggacgggttgcaggggttggtcctctcctcccactgtgcgggtccttaggtctgcatggtcacagccttttggttcgtgtagaatttttttttcccccgagacagggtttctctgtgtagccctggctgccctggaactcactctgtagaccaggctggccttgaactcagaaatccgcctgcctctgcctcccgagtgctgggattaaaggcgtgcgccatcacacccggcttcgagtagaatttgacagcctgtggctctatgatttttaaattgacttgaacaatttgttgtttccgtccattaatcatatcagaagcagtaccattttacttggtcagggcttcattttaagtgcttatttttcataataaaaaagctacttgttttagagactgaatgtagcacatttggtagagtgcttgccttgcgtgaataaagcttaaattctatccattcccaatacacatgaattgggcataatgagataggtacttttgatttttttaaagatttaattatttttatgtgtatgagtatcttcatgaatcaagtgcaccatgcgcagacagtgactgaggaagccaggagagggtgccagatcctttaggactgcagttactaactagtcatgagcccctctgtagattctggggacagaacccaggtcctttgcaaggatatcaagtgttcttaactccatctctccagcctccaaattccaattattaataacaagaatgttttatcaaaacactggatgccattatttctgtatgttaaagctggtgaccaggagctcagtggttataagcactggctgctgtggacccagggtccccagcacccatctgatgacttaaaactgtctgcaactccagtcttagaaggtccagcatcgtcttttggccttcgtagacactaggcatgtacatggtgcagacacacatacaagcaaaacacctatacacataaaaaccatagtttatgacccccacactgaagcatattgcctagcaataggactgaggagtcatcatagctggtccccaagttgagtgcctggttaccatgttagatagttgttgatttccttctttctttctttctttctttctttcttttttttttttttttgtctttttttcaagacagcgtttctctgtatagccctggctgtcgtggaactcactctgtagaccaggctgtcctcgaactcagaaatccacctgcctctgcctcccaagtgctgggattaaaggcgtgcgccaccaccgcccggttgttgatttgagacaaggtctcactatgtaggtaacaggccaggaactcacaggagtattcttgcctctgcttcctgagtactgggattaaagttgttactgccatgcccggccctcttctttgaatgttttaaatcaagcatttcacatacaagaacacacaaattatgagaatgtgcagttgagggagcacacatggaaacagcccttgggtgaagtcacagactgtttccctgaatcctcgacaccccctgtcctttcttccagctcttcctcagtgcttacttctacaagaaaaatctgacttcctagactgagattaatttcccctatttaaagcttttgtaaaaaaaccatgtaagtctttaactccggcatttgggaggcagagccaggtggatctctgagttcgaggccagcttagtctacagagtgagttccaggttagctaggctccacagagggaggttgggggaaaagaaaaaagaaaagaaaaggaaaaaaacatggcatgcacttaaattttttactactgtgtatctctgcttgatatgttgtatgagtggacacatacaccaaagttctgtatagagatcaaaggggagctttgtggaattcccttccactttggagtcagttccaggcataggactcaggtcttccctagggtcctctcatccaccccatcctgcactttaactgtctttgattggtgatagttttggggattgaacccaggtccttgtacagactagctccatccttagctctggtgtctactcttttgagtgttgtgtgttttttactttttaacagtgtttgagagattcatccatattgttatagttgtgtttaatttacttttattcttatagtgttcttttgttattgtaattctgtgttcaaactgtctttgggtgctttccagtttggaaagcctgtaagtagtgctgtagtgagtgcatcggcagtgtgtctaatcacagcacacagcgttaagctttggtaacgactgaggattgttgtagagttggttcactactttatactcgctcctgtaacgatggctttctgtcattctaagcctcccactgtaatagctgttttggagactgtagcagtaacaccatgtgagtgtttcttttgtaaaagtacttttttttcttagctaggtgtggtggttgtattattagtcagggttctctagagtcacaaaacttacggaatatccttttatgttgagggattttattgtaatgacttacagtctgtagtccaactaacccaacagtggtcagctgtgaatggaagtccaagaatctagtagttgctcagtcccacgatgctagttgtttcagctggtcttctgtagaagtagattccaacagatgtgctgactagtaagtgcaagcaggcatagaagaatgaaacttccttttaatgtccttaggtaggccttctgcagaaggtgtggcccagattaaaggtgtgtaacacctgcctagatctgggacttactttgtctcaggctgaccttgaactcagagatcttccctcagtctcctggggttaaaggcaagtattaccgtgcctgaccactatgcctcaagatctccatgtcaagatccaggtcagaaacttgtgtcttttggcctcaagatctggatcacaggttagccctccaattctgaattgtaactcatttcagatatagtcaagttgacaaccaggaataaccattacggtggtgtgcacctttaatcggagcactcagagtcagaagcaaacagatttatctgaatttgaggccatcgtggtttacatagtgagttccaggctagctagagctacttattgagaccttgtctcaaaaccaagtgagtgcaggcctacacgtggctaggtgtgcatgtggggacaggtactcaggagccagctctgtctttctacagtagtattggggattgacagcaggccctgttacctgctgagccatcttctgttgtagtttggtatacatttccctgatgactaatgaagttgagcatctttttgtatctcttagccactagactatcttgtgaaatgattacatttccactagaatataagtagaacatctgtctgtccttacctcatagtaattggtattcagtggaagttgcttctagtaaatcaacattaaaggaggcaaagaattctgaggataagttgttctagctctctgtcagactcaagctctctgaactctcccttcctggtccatagcagacaggtatgctatatctacttcagcaattacattttgtttctgtaggagtgatacattggtgtgtgtgtgtgtgtttggggggatgcatcttgcaggtgctctctggagtcatcatctgccatgtaacatagctcaggccagggggcatgttgtcaggcaggttgagttcagtaggcctcactggccctttagagggccagagttaacagaaggaagtgttttcccatctgcctttgccttccgaaaggcagagttagggtctgtgtccacaggactcatctactcatgtgtctcgttctttggaaagcaatactgttggtccaggagaatgacaagcaagctgcccactatcaggcagtctggatatagagctggactgggtgccagttgtgtatgaaaggcagctagccagtgcaagaagcccctggacctatgggacattgtgtccacccgtcatggggaggatgttaatgaccccttagggagctgaagttggctgcagttcctcttactgctgtctactcgtggacatggacttggggctgttgagagcctctgctctagaactgtgggccttaacttaaagtgagacaggattgttctcgcttacccagttcttgaatttgaaaggacaggcttttaaggtcaaacagcaaccatcttgtcacaagaatgaatgttctagaggtttatgctccctttttgcagtagtaatttgctgtggaatttctaaaggtaaattctaataggtactgaaaaattcaaagggtaaatgtttttataggttaatttttaggtttatgtgattggatagatgaattatactgtaaaccgttcttcatttttgttcctaaagtagctgtagaatatacatgggcaaggaaaatgtatgtgcttgtgaaatctggtttgcatggggcttacaaagtttgttttgactgccttaaaaagttagtaattacattttttaggagatattgtacagatcggcttgatgacatttgaatgttttcttttggaaacactagcaagaaggctcactttgtgctcagcattgcctgaataacctattgcaaggagagtattttagccctgtggagctatcctcaattgcacaccagctggatgaagaggagaggctgagaatggcagaagggggagtcactagtgaagactaccgcacatttttacaggtactgattttcgactcactgagccccattttattgtggaaatgcgggtgctctttagaggaggatgagccgttctcccccaggagtctgactcggtaattatcactctgctcctcctcacttgggaaatggggttgtacagcgtgttcttttaaacgtgcacactaattttaacccttttcccatccccctctgcccacaactactgcccatgaaaattgaacagcagccttctggaaatatggatgacagcggctttttctctattcaagtaagtagtccagagtgcagcgctgcctcatttccagccccgctttgtcctgaggctcagttgtggttgatgtgccacagtgtgccacagctctttatgtaacgatggaggcttctgcagctccttctgtaaactgtctgcagaagataagacactgcagagtgctacacgtacagagatgaccacaggacagtagactcttcactttagaacggctttgactgctcacatgcttaggacaggcaggcccttgctgcctatacagtcctcgctggtctgagacttgtgatcgtcttcccctctgtgtctccagactgaaattataggtgtgtgctaccacagtcagtttagagtggggcttttaaaaattactttctaagagagattgcttaatttgcatgtaggtgctaataactctaataaatttcagtgcttcaaactccccatctctggcatgtctgagaaattgcagtgtcttgcagtcttctatttaaatcatcctccaggattggattcctgttgggtaggttgtagccctctgaaggctggtatggagattgccctcaaggccttgcatgtgccgagctcaaactgaccccgagccacatcccagtactttacgttctatttatctgtgttggtttattctttttagtgctggggatgatatctaagacaatattctgctctagagaaaatctccagccctgtggttatacatacatacatacatacatacatacatacatgcatgcatatacgtgtgtgtgtctgtgtctgtccttctgtagcctagcatggcatggccttgaacaaagccctgctgcggcatcccagttgttggggttgaagtctgggcacggatgcctgacttcgtttgtgtacttgtgaagtccattctgacaatgtgagcgttgtccaaattctttctgaatctgtcttttgagagatctacttatgcaagtgtctttctttatactttccttctatgccacccttctagagtcctcattctctagcatttccacccagtacttcacttgtgacattgtgaggcccagtgggcttgtgctgagagtacaggtgagagccagcagtctcctgtggtgtcctgtgtggcactgcttccatctctgctctctcgcacttgcagttggtctgagttgtacatgtttctttgttgacttcctgggataacaggtggaatgttgtcttaatttctctctttttttttttcagcttgctatcatcaggtttgattttctgttcatggaagtttaaaatacatcaaaccttctttttaaagatttatgtgcccatgtgtggatatgtgcacatgagtgctggtgtctgtggaggacagaagagggcactggaaccctgcagttgacattacaggctgttgggagccctgacgtgggtgctgggaactgagcttgggttctgtaagagcagtgtatactgttgaccacagtcatctccccagtgcccagacctttcttttcaacccccagggagaatttatttactatacacctttggtgactgccattgcaggtagtaagtgtaggaagggatagttttacaaacagcacccacagtgtggcgtgcttctggatgtgtgagacagtgttatctacaaattctctgcttttctgacattcctcagaatggaaaagctctctttcaaaatggatgtgaggggctggagagatggcttccgtttaagaatgcttaatggtatttcagaagaagaccggctcagttcccagcatgtacgatagactgcttacaactgcctgtagctcctacatggacacctgatgccgtctggcctccacaggcactcagacacacttagataaaaaataataaaacaatacatctttaaaacttgcaatgaaataaaattaagttcacatgtatatattatttatggatttagtggggtgtcaagggaacataatttgtaaaagctatatcctcaaactatatatgaagaatagttgcttatagtagctgtgctacttaaacttggacttgaaggtttagctcatgaaaagttgttatttttcttttgacaggttataagcaatgctttgaaagtttggggtttagaactaatcctgttcaacagtccagagtaccagaggctcagaattgatcctatgtaagattttttcctatatttctttatttagatttgatttttaaagctgtaatttctgaatgaggacaaaatcatcatgaatgtctttgctttattctgtatttgatgcccttagacttcaccccgtcacctttttggtgcctttcttcagtgtcagtggtggccctgccctgagtcctgtgggggctttgtgcttagcatcactaagctcctatgggagacgcatagtgatgcgacttttattttttcaaataagtaattaagtattaataagtaattaagtatgtcattaagtaaatgataggagatacttgctagtacatctctactatcccaacttaacagtatatgttttgttttcttctagaaacgaaagatcctttatatgcaattataaagaacactggtttacagttagaaaattaggcaagcaggtaatatatcttctattttcttgtccttttatcataatctgtactctgtttgaaactaaaatttgatattggtctctttggaatgtatcctaggattctgtgcactctacccaagtctggactcaatttaacagataaaaatttcctagcttaagagaagataatcatcttctcttcagatttttaaaaataaacctatatatgttatgtcataatgaaaattttgtagtaaaaacagtgcatatgtggttaccgttacatatgtttttgtgtgacgatttgtgtttagcatagtactacaacaaagcctgagatcatggtgggaatgcgcattacgggatgggcttctttaggcgattctagtgtctggcagtacttacatctgtgcacagttaccactgaacgtggctttaaactagtcacgtaaggccttactagaatgttagagcttgctaaaggttattgaaaaccagcttatatagtcaaagggaatgaactgctaatatactcgcagcgtggatgaatctcagaaatgggagctaagacctaatgacagaaagtagaccgactagtgcttgtgtagggctgaagttggagagaaggcacagagggacctggagacgggactctgatgagggtgctccagtctcggtcatgttgatgtgggtgatagagattctttgaaacgacaaactgtagaagtggaaatataattatgtgcagttttatcccagtgctgtggcccacacctttgacctaggaagaccttgagaccagcctggaccacataatgaaaccctcaagagagatgggggagcgggaaggcactttatgtgccctagtaaaactgttatttaaaataaaaagaaaggggctggagaaatggctcattggttaagagcactgactgctctccagaggtcctgagttcaattcccagcaaccacatggtggctcacaaccatctgtaatgggatccaatgccctcttctggtgtgtctgaggacagctacagtaaactcatataaattaagtaaatgacttaaaaaaaaaagaaatataaaagattattaaaaaatataaaaaaaaaatgtcgagtgtggtggtgcacatctttaatcccagcagagatctctgtgagctcaaccaaagcttcagagtgagaccctgtgtttaaaaatccaacaataaataagaaacagaacattgaacctggagatgtggctcagcgagtatgactttactgctctctcagaggacctgagtttggttcccagcacccacgtggtggcttataactgtctataactccagctctgtggaggaggtgcctttgggcaccaagcacacacatgatgcacatacatacatacatacatacacacacacacacacacacacacacacacacacaaaattaatatattaaaaagaaagaatacagtgagttaaatcaatatatattaattatatattatgtatatatatgtatattgatttaattcactgtgttctttctttctttctttctttctttctttctttctttctttctttctttctttctttctttctttctttctttctgttagcttttaattcagtcacctggaaggagccagtcttcagtgattgtttgctgatatagatcattggcagtgatatacttataataagcacaagaccctaagattccacctcttgctccagaacaataaggaaagagcaatctttaggttctttgtaagctgcatagggagccagttaagagcggtgtgtatagtaaggtagcttagctggaacaggaatcaattatgaaaggtccagggtcaacttcatttaacttctctgcccttctcccttgtagccactgagggtttatttgtgcctttagaaaattatgacccagggctggagaggtggctcagtggttaagagcgtggactgcttttccagaggttctaagttcaatttccagcaaccatatggtggcttacaacatctgtaatagggtctgatgccctcttctggtgtgaagacagctacagtgtactcatataacttaaataaatctttttaaaaagaaaaaagaaaattatcacccagcattattttcctgtatcaagtaatcactggagttttaaggtctggaaatttaaaacccataaaaacttagtagaaataggaaaacattgttttgaacttttacaatttttagctcatttttggattttttacattttgaactagttttagtttgtctttgacaggtacaaagatagcaagaatatgtatattgatccttgattctgattcctattcttgtttaagaacagagttttagctggatgtgatggcacgtctttaatcccagcactcaggagggcttggctgatctgtgagttctgagcccagcccctggtcctgtgtaaagaaaggaatgattggaaaggttctttggctggggtcagaatccaggaagagcccttagttgtgcatggagttgagcatgactttttgcatttttctgttttaagttagggcacctctgaggttgtgacttacctaatgctgttaatcacatgtagcaatagcttagaggtcttgttagaatgaagtgctcgtcataaattctctccgtagagtgtcttttagaaattggagtcttttggccaaaggaaaaagtgtgttgctgtcatttttttgtctgtcaatatggcaggagtctgtgtgttggcctgacagtgtaaaacctcttagttacagctatcaaaaagggcatcttaagatactgccagttgctctccttttagaagttcaggttcttgtttttagaaaagcatttaatagtgacaaatgttcagcttttttttttttttttttggtttttcaagacagggtttctctgtatagctctggctgtcctggaactcactctgtagaccaggctgtcctcgaactcagaaatccttctgcctctgcctcccgagtgctgggattaaaggcatgcgccaccgcgcccggcttcagccttttttttaaagtcatagtattcagtactttaaaaattctcagtttgatatatttctattatttctatagtcttattaaattttggtgggttatatgcataacatgggaaattctttttacatataatattcattaacttaaatactgatttttttttcctagtggtttaacttgaattctctgttgacgggtccagaattaatatcagatacatacctcgcactattcttggctcaattacagcaagaaggtaaataagatcaaaagtttgcttttaaactttaaaagtagcttaaatatagctgagtcatgaattgtgactacagaagcactggtctccgatttgtgagtgtgacggtactgatttctggctgtggtttgagtgacgcagttctatgtgagtgctccctacactgggacatcccctgagcctggggcttcctttccattcctaagtgctcttttgcttttccgtcctccccctcacagggctcacaggaggaggggcatgctcctctcattcctgttggctcattttcagtcactgttcacttggtagattggtgcctttgagtaaccacctggattcgccatgccttgtctgtgtaggcatctgtgagctgccatttttattggagagtttggatgtctagttatctgtctcttttccttaaattcttagtcatttccacaccagtaactattcctctttcaaagattgttttgttcactcttgtcttggcattgccaatgagtgtaactcccttcagattctagtcataagcatcgcagtctttgaccatcaccttctaccttcatgacagtttgctgttccgaccaggctctgaagttaccatgagatccagaactcctcttaaatgattcttcaaggtgttttgttttgttttgttaccatgagatccagaactcctcttatatgattcttcaaggtgttttgttttgtttttgtttttttgagacaaggtttctctatgtaaaagagccctggctatcctggaactcactttgtagaccaagctgccttgaactcggagacctgcctgcctctgcctcctgagtgctgggtttaaaggcacgcaccaccatgcctggtgattgttttctttttttaaagattttaaaaaatttattttatgtgataagatgtttgcctgcatgattctgtgtacactacaagcatgcagttctcaaaaaggccagaagagggttttgggagtcttggaaatggattcacagacagttgtgagtcaccacggtgggtgcttggactagaacctgggacctctgcaagagcagccagtgctcttagctctgagccatctctccagtccctgagcctgtgttcagttgcattcgctggcttctttcctcatctttcctaaataacaagaatcttgaccacaggtaaagtagctcgtgaccctagacgtttcctgtatcatagcagctgaacatggcttcaaacttaggtgaaatatgttggttataattttgtgcttacagctttcaaatgaccccttgatagttatttcacaacttagctctccatttgttacacattgctattctttctggctttctcttgtattcttctgagaacatagacatgattccctttctggtagcagatctctctctttgtttctgtagcttgtggtttgagcctattaaaataggtgggcgtggccctccgtgtaaggtcagcccttcaacatgtactgtatccctgtggctcctgttcagtcaacattcagtttttgtctaatgctctcctgggttgaacattctcccactcccttaaaaaaagtctatgcatgggtaaaaatccctttccctccccctccattgattaaaaataaagtgcttttggtaactatgaaactttagctgcttgcccatttaaattttttccagtagaattatctatagtgcattgtctattgaactcattccacttgggttgtgctgtaaaccactcatcttcaaaagtctctcttctcactatccgggtgacttctacattgccagtgccaggattcaattcttagatctcctagtctaaacagaacacaataaacttgttattaaaaaacaaacagggctggtgagatggctcagtgggtaagagcacctgactgctcttccgaaggtcctgagttcaaatcccagcaaccacatggtggctcacaaccatccgtaacgagatctggcgccctcttctggagtgtctgaagacagctacagtgtacttacatacaataaataaataaatctttaaaaaaaaaaaacaaaaaaaaaaacaaacaaacgaacaaacatcccaaactaaaaacagatataaaaggcgaggaagtgatgtgccttcctgtgcccttcccctcatggcctgttcctttataccttgtccacttaaggctctaaaagtaaattctgtttgtttgtttatttattaaaaactacacactggcactatgattatacctaaaagtgttgcactttctggtgatggggattggaaatcccagttgtgcgtatgtgatgcagagctccactctgctttgtatccccagctggctagccacagagctgtgatgtcacagatacacagctttaagttccgtatccctcacctctgatgatttctttcacacgttaatctgagttgaaatcaggttcaataattgtattgggttagttgtttgttttttttcctaaatcttcttataagtttccttgtctctgttttttgcctttgatgtatttgccagtgttttgtcagggggatattgggttgtttgcctgtttactgcatcttggtttttttcttgtgtattttctgactgctggatgctctatagtgcctggacctgagatgtaggtacttaaccatgctcaagctggtttgggaattgtcttagtcagggtttctatttctgcacaaacatcatgaccaagcagcaagttggggaggaaagggtttattcagcttacccttccatcaccaaaggaagtcaggactggaactcaagcaggtcaggaagcaggagctgatgcagaggccatggagggatgttctttactggcttgcttcccctggcttgctcagcttgctctcttatagaacccaggactacaagccagggatggtaccacccacaatgggcccgcccgccttgatcaccaaccaagataacacagtggccttacttgtgggcatctgcctgtctcaccagttgctgcttttgaggatcatccttctcttcccagtgtgtaacgttggggtgacctgggctcagttcagcttcttccttaggtgccatttcattgcttcaatcacagcctatgatctgtgctcccataattctcagaatttgttctttagcctagacatttcctttggaacacctttgtgtggcagctcaggaagatttcaaatcaaacaggtccacaaaagacatttaaaatgtttattttaatatttaacgcgtatgagtgttttatttatgtgtgtgcctggtccccatggaagccagaaaagggcatcatcggatcccttggaactggagttgcagatggttgtgggctgccatgcaagtgctaggaatcacatgtgaatcctctgcaagagcagcgagcgctgttaacctctgcaccatccctcagagtggcttacccactgagccatctcaccagccccacagagtacttttataaaaacaaaatgtatattatgccatacccttacattacctgttagtggtttcctcgaacactcaaaataaattccaaagttgtaaataaaatccagaattactatgctgtttgtataaggcaggatatcttctcaggacgtgttcactaggtaccatagtgagctggcatgctgattctaggatttagaaacagttttgttagcagaaaacagattaagacatctgaactctgattaagcttgttcttaaaaaatgttaaacatagccgggcgtggtagcgcacgcctttaatcccagcactggggaggcagaggcaggcggatttctgagttcaaggccagcctggtctacagagtgagttccaggacagccagggctacacagagaaaccctgtctcaaaaaacctaaaaaaaaaaaaatgttaaacatattctttttagtgagcagccttctcattctttgtttcattgaagtacaagaaaaatcaatagtagaaaatgtttttaaaaaattaaacttaattgtggttgagaaagcttagcttattaggtatgtatttattaaaagttgctttgtactagtgtattttttttttctttctaaaccacaaggcacacaaactagattagggtactggcttcccagctcctgtttttggttagaaggcatctatgtatggggcagtgagcagggtgccatttccagcatgttttccagtgatttgtccattttagcagtcactggacatactaaccaagtgtgtcttcacaccagccatgtgagggaggttcctttatcctccttcaacaaagggtgccagcagagatgggtgagatagttgacaaaaccctgtggcaccggcaggtggcagagctaggctaaaacgcaggcagtcaattccggatcctcctctttagactgtgttcaggctctgccctcctagggaccttgtagactgcctttgtttcttgtagcccctgaggcttcgagatgagaagagtgatcctgtgtgacttaccgtagattaccttcctaatccaagcgagagtcggcactaaatcaggtcttctgtttttcctactgtgctctttctgtcagctatcatttcaaacaagtttgaattctttactagttgttttagtttgtttttgcctctttttaggttattctatatttgttgttaagggtgatctgccagattgtgaagctgaccaacttttgcagatgatcaaggtccaacagatgcatcgaccaaaacttattggagaggaacttgcacatctgaaagagcagaggtaaaactacgcgtgagtgtggcgtgtatggtggagcaccccttagaagagttaaaggtccatgcgtccattccttgtgtctgtgagtgcatgcacatgattgtgagctgtgtgatgtgggggctgggaaccgaacttggccctttggagagcaggacgtatttgaaccctgagccatctccctgccatttaatgtgtgatcactttaccgttggtgatttgggtaatttgtattttgtgcatttcttttgtagtgctggagatcagcctcttgttcatactaataaatgttctattcagtttatgttcaatctcctgggtttgttttgtattgttttgtcgagacagggtttctctgtatagtcctggctgtcctggaactcactctgtagaccaggctggcctcgaactcagagatccgcctgcctctgcctcccaagtgttgggattaaaggcatgtgccaccatgcccagccttcaatctcctatttttatttatttgtttattaattttttttgatcattttatttatatgaacacacttggatggagggctgggagtttgcgcgtatttaattttaagtatttatttgacaattttatacatgtgtataaatgttttcattatgtcgtccctcactaccctcttttatcccctgtctgttccctctgaatccctcccagcaggtccgcttcctatgctcattgctatttcttctcttccttctcctcctcctcctcttccttcccctcctcctcctcctcctcctcctcctcttccttcccctcctccttctcctcctcctcctccttcccctcctccttctctttctcctcctccttctcctccccctcctcttcctcctcctcttttttcatcccttctttctcctccccttctttctcctcctccttctcttcttcctcttcctcctccttttctccttcctgactcactgaggtttgcttacacagccagcctaccagtggttgtcccattgaagaaaagttactccccctcccttagcagccatagctcttcagctaggcatagggacctctgagtactccctatccatgctggaatgttgatgaattgttcttgtgcaggttttgtgctggtaactatagctgctgtgagtttatgagagcaacagacatattatagtgagaaaataacacggcagcatttcttcctaatctcctgctcttacatcctttctccctgctcttccgtgaagttccttgagccttagagggatgatagagatgtcccatctaagtctgggcatttagcggtcacttattctaaaacactttgaatagttctgctatttgctaggggagagggcagcttttcagcccaaacactaacctgtaggtctaactctatttagaagggtgattgacatgtctgtttattgaaactgcagtagttgtttcccctaccgaggacctgtgaccaacatagccatggacttttgaccaagtttatggtaccaggtcatacctacagaactacctaatgtggagtggccctcaaatccagtaaaacgatggttgggccaggcctggtggcacacctttaatcccagtacttgggagacaaaagcaggtagatctctctgagtttgaagccaaccagctctactgagttctaggacagccagagctagataatagagagacactgtctcaaataaataaaaaagaaagagaagaaaaagtggttgtttgccccataatagtcacgtcactcttgtgtagcagaagaatattacagcatcacatgggctggtttagactattagtgattttcccctccagcagcctttgtagaatctttcagcactgtgaaagcttgtcagcaaggtggaatcttctagcgcagttccagcttggtttctgttatgtaaccaaagtgttacataaccaacatctctgccaattaggtcttactatttagttctggtgggaaactaagaacgatgtctgcaaagaagcagcttttctctgagtggcactagtctataggtctgatgtgcttagaatgcagtttgacatggtcacatactatttgaggagcctctgtatttgtttgcttcttgatataagatctcaagtagctccaactggctgggagtacatatgtttgtgcctccatgttttatttatggtgatggaaactgaactcaggggattgtgaatgctatgcacatattcttcccactgcatttcatctccagcgcttacctcccccaaccaaaatgatttagtgtcaagtgattatttgtagtgttttggctctaatcctgcattttatgcatatactcttatcattgaacagttccttagtcccttccctgttcccttctgttgaaagacaggtctcattaagttgtccagttatcaaacttgacatccttctgtctttggctcaaaagtagctgatactcaacaagcatatgccactctgcccagggaggctgtgttttagtgaagtttatagaatcaacactttgaattcctagaatacattaggtttttatcagcactcagttgttgttagtagaccttatctaatagagcatgttttccatttaaaatctttcatttgcaagtgccttcatgtttatcagacttgatctaaagttgaagaatactggactagagagatggcttggtggttaagaggactggctactttctagaggacctgggtttggttctcggcacccacctgctcgctcacgaccttctgtctccagtgtcatcggatccagcaccctcttctggcctcctcaggcactacacacacattgtgcaagacatacatgcaaacaaaatatccgtgcatattggttagatttttgagacaggatttctaggctgtaattactatgaattcatttgttgtttagtgccctcaaagcagacctggagcgcgtcttagaagcagctgatgggtcgggcatatttgatgaagatgaggatgatttacagagggctctagccataagtcgccaggaaatcgacatggaggatgaagaagctgatctccgcagggccattcagctcagtatgcaaggtttggacatgttgatgtgtactttagtcatttttggagaagtggatcacgtccttaacgtttctgaaagttagtgcacttttggaagttctttgatagttactgcaaaagcaatagctccaaactttgagcatttctttaagattttcttgatcttaaatcatttttttataacttgcattatactaggactgtattgtgtttaacacatttaccattttggttgtggttatgctgttgagtatgatactgagccaatacaacactaatttaattacttttctagtgaccagatgccccttacccaagccagctgttttaataaattcacacagcacttactggctataaagacttatatagactatacagattaagactccagccatgtcacaggatgcatctttttcattgatgtaagcgctcatcatcagtggaggaaagggaaggcaaagccccttagggtaggcagagaaaagtgctgagacactcaaagccgttcctgagagcacaaagcactttatttttgtgattttgttttaatctaattcgtatgaagctgtttctacttctaatgaggttgctcatcatctaaattcctcaaaggtcttagtgtactgaggttttgttatgatggccattatcgttatcctagactcctcacctccaggctcacctctgcatactcttgtggtgtgaagtcccatgttatattaggaggggcttgttgggttattgaagtaataaacagaaaaccatcttaccattttcacaatttacatagaatctgtgcttggtacaattactgttgagagcttagaaacattcaagttgttaaaaacagatgttatggtcatccttcaaaggttgtgaggaatgccttgcctttgaaggtggagatgcaagttaaagagcacagaagtgtggtcttgatacttcttatacgaggtgaacagagagcttgtatcctcacatctgatgcatcacagatcgcatcagccttgcttgcagtaacacattgaattgtaagtccttaattagatttctaagacttccataggctttttaaagttacagaacagtagtggaatgttttaaaactttctagaagcttgctcctataagaacaaacatactactgcttgtacaggtatataaaataattttttgtgtttgtttttaggtagttccagaagtatgtgtgaaaatagtccacagacatcaagtccagatctctcttcagaagagctgcggaggagacgagaagcctactttgaaaagtaaagtagttggtacagattaaagttgcatatttaatacctgctgattttgtctgtttataaattactgcttaccgcctgaacctatgaacgtaagaatatattttctaaaattttttcagagaataaggtgtgaaatacttaatcgtttggagaaaaacgattgccagatcttggataaatttatatagactaggataaaggaaaccttgtgaaattttgcttatcaaaaggaaaatagacttaggacaagcagaactatgtcagtgcctattgatcctttgtatgtagcgttggtcacctatgagtcctgcttaccttctcatcagtagacagggaaaacagcatctgagggaggtggagcctcttcccagtgcagtggcacatgctccctagtctttctcttgtcgctttaggaggtccaagtccaccagcatcagcggcatagaagcataaatctgagccataagcttccgaagctatacgttgtactctgtctatacgtcctcggaagagaaacacttccacttttatagtgtcttcctttacagtaatcatcattcacaagtctttcttttattttttggtttgggcagggctttgttatgtactcctggtggcctcactgatggctatcttcctgtagtcctagctggtctcactactggtggctgttctcctgcctcagtttcccttgtactaggacaggtatatgttgtcgtacctagatttttattttaaaccatactccaccttaaaagttaaataatccatagtagataattgaaccctctgacctcaggtcagaaaggtaaggccagggatggactctgcctggttatataccacatctctcaattcagccatgcatttattttcacatttcaaaatctctgaaaagatgggctttttaagcagctcaaagggcagtgctcagccagtatgaatgagcccccagcccccgagtgcagcacagcagcccctgagcttgagctgattagtaaggcttggactgttctgcatcggctagtgtctgaaggtaatgtttaccttgttctgtttgctggttttttaagtcacaactcataagtatatgaaggaaagttctgatcagctgacatcctcttaatgtgagatatttctagactttattcagtcactgattaatagatttaattatatttacattttagaacagtcttttagtgttttttatgtcctttgagtttttgaaattattactctttaaattatgataaaccttagatttatgtataatgcactcatacttgttactcgttgttggttgagaccagcacacagcccagtttttatgcctctgactcccgttctttccgttctcccacggcatcgggcttgctccaagtcacagtcagcgtgtcattactttttgtgtgtgtctccaaaatattgtgggacgtgtgcttgcttgtgatctgtagggttgcttctggctttgtttttgtgtttttttgagcaatctagctcactgctgtgcaagtcctcaactcctgattatcctgactctcactccgagtgctggagtgcgggtgtgcacaccacatctgacttgactgtttctctctttatttctcctaattagtgctgttgtcacaatatagtaataacaacaacaacaacaacaacataaatatctagttttaaaaagaacttaaaattacttaagtaggcaaaatgagtattctagaaagtttaagtttcttaaaaagtttgttcctgccaggcagtggtggcacacgcctttaatctcagcacttgggaggcagaggcaggcggatttctgagtttgcggccagcctggtctacagagtgagttccaggacagccagggctacacagagagaccctgtcttgaaaaacaacaacaacaaaaaaacaaaaacaaagtttgttcctactatcccttccttcagtaagtgttgttagtgactgtatattcccttctgtcatacacatattcatagtctctctctcagtgtgtgtgtgttcatgtgcgtgtgcatgaacatgtgtgtgtgtgtgtgtgtgtgtgtgtgtgtgtgtgtgtgtgtgtgcaatacgctatctatggttcataggaggtccaaagacaaggctcgcaggttttggtccctcttctccctccatgtgggtcctgtcagtggcccagggcatcaggcttggctgccagcagggtcttcacttgctgagctttgtcaccacctccttttttgtatataaacattttgttaccttttttgaaatgagaatttgaagcttccactgacttacacttttagcagcagtaaaggtaactcagtcccattccatgacgggtcagtgatctatagcaaccacagtgtaaagccgtaacttgcgcttttgagctgacagatttgggcccatcttgtaccctttgggaaaaaaaataaaaacactttgggtatgagcatgcctcttttctagtggtagattgtgtattaaagattgcttctagctttagtcttttatcttctgctgagagcttagacagctagaatattctacctagtcacagatagccaagatgaattaagggttaactttgtagtatttatttttaacattaactagtatttaaaagtgctagtgtgggctggagagatggctcactggttaagagcacttactgctcttccagaggtcccgagtccaattcccagcaaccatattgtggctcacaaccatctgtaatgggatctgatgccctcttctggtgtctgaagacggctacactgtactctcagacataaaacaaatcttaaagaaataatgtactagtgtactacagattttaagaagaaggtgtgcgtgtgggggtggggtgggggaggggtgctggagggtggctcattggttaaagtacttcctgcgcttgccttttcctcaaaccctccatttcttagctggaatagctccctgtttctctaggctctgtcttggctctaagactctgacttccttctttccctccaagctggccctgctgtcagcctattactcacaggtcagcagtcttccctcgtctccccactgcctctgaaggcctcatacttaatggaaatatgaaatatgacacattataggatttcttttcttaggtaaaaatgttactaaaaattagcctactataaattcatagcttatgagtaagggttactaagtaatgtttccttgacatgacattttttttagcagtgatgtgtaaataaagtccactccggcattgttaacacctgctattgggagcataggagtcagtgatgggactgaagactgtcggctgctgcatgctctacagatgtgtgtcagcatcacttacgtcctctctaggatggctttgaatgccgtggtctatctgctacaagaagcggtgtttcccagcagaacaataacacacattcgtagccaaggagtcctgtgatgctttgactgcttattcttgcactgtagctttcatggtgtgacctagtttatcagacagttcagtttaagagacacaaataggtaggggcgtttaagcgaaacactaactaatagttaagttaggggcttaacaatcttaggcattgttctgagccaggcttttgaaatatagaccaatttgtgagaagggctgccaccattgcctgattagggtggtggggtcagtggagagcgcccatgttcagttcccagaacgacccctatggctcataatcacccaagactcagaggattctgcactccattatcacccctgagggtatgtgcgagtgcacacccctgcacgtatgcatgcacgtgagcacacacacacacagagtctaaaacattagatcttttatataacatatttaattagtaaaacattttcttcaattttttatatgtatgggtgtttttcttgcatgtatgtatcagtctcacgtgcatgtagtgcctgaggagccagagaggatattagatccccctgggaccaggattgtagatggttttgtgctgccctataggtgctggaaattgagcccaggtcctttgaagaacagcctgtgccctcaactgctgaaccagctttccagtccctaactaaatcttatcaacaaacaaacgagcaaaaccccagaaattatgtatagctatgatatagttgtcaagactttctggttccactgaaatagctgtgaggcaggattcaaggctgaatctccatgactttgcttactaggaaaacagtgtgtctcactgactcatttatgctttttgtagctcatgtgggttcttagtctgcagccagagaccaggttttagctctgtactgctgtaagcctgaaggaagacatggtgggaggttctgagggactcattccctagcagcatcttcagggcttcacagtggttgggtcagggttggcagctgatttctgttctcattttgcataatgtaaggttataataaccccatgaatatgtacaatattaagtgaaaaattaaaggtaaattaaagggtaactctctgaagttgcattcacacatagaatccgcagagctcaggcctcccttcacatcacccttgtatagaggtttgtagcatcaggaagtcagtattttgcctcaaaggccaacaggaggaaagtggagtgcctacaatctgggttaactttattgctcgctcactttaaaaactcaagcctggggaggacaggcagggtgcccttgggaggggaggccggcagctcctggagttcaaggccatcctggctaccaacctggactagagaccgtttgaaaattgagaagaacaataggaaaaaagtatgctaactataacttagttttaaagttttggtccttttaaaatcacacaacttttaaatctgacttctatgtcatttatgggttttcttggtttttagctctcttgtgtgtttaaagcagaactagtgtgcagagctgcttgcccctcgcaatacactttacccagaggcgtctggaagtgttcttattatagcttggtattcagcatacattttctgaacacaaggatacattcctgcaatgtgttgttttgttttgtttgttgttgcttttgagatagggactgatatgttaccaaggctggtattccattcctgggctcagatttccttttcctttggccagttgggtgactgcaggcatgtgtcacaatgagcttcgctacttttgctttgagacagtgtcttagccagtgctcttgctgtaatgaggcataatgatctcggcaactcaaaaaggggagtatttaattggggctggattacagttcagagatttagtccactgtcacagcagggagcatggcgggatgcaggtagacatgggctggagaagtagctcagagtcctacatcggcatccatagacagagagactgggcctggcataggcatttgaaactttagagtccacccccagtgacacacttcctccagtaagatcacacctatatgaccctgtggggccattcatattcagactattacattctagtccctggtccccacaagcttgtagccatgtcatagtgcaaaatagtccaacttcaaaggtcaccatagtctcttggtcttaagactgcttcaaaatctaaagtgtcttctgagattcatggcaatctcttcactgtaatcccctgtaacatcaaatcacaggtcacaacatacagtggttctgaatatagtcatttctatgtctttaattcttcaagtctgtgatgaagctgctgtgtgacaaggcacagtttcaggtactgggacacaggtaagcagcatcaggttgagctctcattgcttacagaccagacagagtatcaagacagtatgtttgtgccgagaatgaaaatgaaatagtgagaaagccaggaggttgcttgaaacgggatagtcggagagggactccagggagaaacttagtaaatccaggcttgagtggcagcgagggagccagcccgggaaagcacattaaagtgagatagtttgtcttatcaaaggtgttttccagtggcttctaacagtgataaagatatataaaccaacactcatttgtgtaagaatcactactagtgaaccttgaacagaaagtgcaaatacctacctcttctctgataattcaaatgtgtaggttttttgaatcagaactttgacatttttatacttgtaattattaaactaatttctcaccttctgaggtattcaggcagtgaccattttgattcatggaacagcttatttcctacgtgattgcctgctctcctggcagatctcctatgcgttgttttaacagatattcacgtttgaatgtttcaggcaacagcagcagcagcaggaggtagaccgacctggacccctttcatatccacgtgaaagaccgaccacaagttcaggaggacgtaggagcgaccaaggtttgctttctgtccattcacagtgatgctttactcgatacccaagatcctcgtcaattgtactttatatttctcctcctcctcctctccttcctcctctttctcttccccctccttctttatattgggttttttatttgtttgtttctatctttttctttttttttcttttctttctttcttttttttttttgagacagggtttctctgtatagccttggctgtcctacaactcactctgtaaaccatacatagagtcataagagatctgcctgcctctgcctcccagcacagtgattaaagatgtgcaccaccacctggcttttccttttttaaaaatttatgaattttatgtattagtgctctgtctgtatgtatgcctgcatgccagctgagagcatcagatcccattataaatgttgctgggaattgaactcagaacctctggaagagcaacccatgcttctaaccactgagccatctctccagcccccttttcttctttaattgtattataaaactctttttgttttttggttttttgagacagggtttctctgtgtagccctcagctatcctggaactcactctgtagaccaggcgggcctcgaatacagaaatccatctgcctctgcttcccaagtgctgggattaaaggcgtgcaccaccacgcccagcttataaaactcttaaaaatgaatttgtaatataccaatttcctctgaactataagggagatagacacttggtagttgtttggattttatttatttaatgtagttttggttttgagacagtttcattatgtagctagggctagcttggaactcactgtgtagcccagactagcttcaaattcatgagtcttcggtttgggcttttttagaagtaacaggaacaggcatgcaccaccatgccctggttggttctaaaatcgcacacatagtactttaacttcacagttgacacattcctgagaaatccttcagagatgattagaggtaataaataatagtaagtggaaaggaaacacatttcaccacttagtaaaggaaaccatctcgttagcatagtctagataacagctggaggccaggtgactactcacccatcctccagacagcagctgttaagctcgagtcaagtattggtagaagctgaatggagaagaagccctgtctgtcagaggacttcatagaatctatgcagagctctcagagtgacacaaaaacagtaaaaaaaaactgatgaaggggtgctggagagatggctcagcagttaagagtgctgactgctcttccagaggcccagagttcaaatcccagcaaccacatggtggctcacaatcatctataatgggatccaatgccctcttctgatatgttcaaagacatcattgatgtactcacatacataaaataaataaatagataaatcttaaaaaaacaaaaaaaagactggtgaaggattgtggatgtgagatgtgtcttgcactagagagcacattacacagaatcctataatgcagctgcaggtggctttgacacctctgtcctacttgggcacctgcggtcaatgtgcatatatcctacacagatgcctgtatcagaggaggctcaccgaaaggaagatttcattaaaactcacaaggtgacaaaacccaagtacccagggttcacttggaaacaaaccactgttattccaggaaccatgaaagaaggaaccacgtggacaattttaattgagcattgctttttggttttttgttttgttttgttctgtttcgaggcagtctcactctgtagcccagcctggctgtgaattcactattgtcccacgtctgcctctggagtgctgagactctggtcacccgcagccacctgcatctcacacattttagagcagaagagtaactgaaatgtaaaagctcagtgaatggacttagcatagaaagctggtagactagatgacaggcatgtagaaatccttcccatcaacacggcaaactgactgtagccaatgagcagagcgctggaggcatctgacattattagctcagcctaactcacaggagcctcctaactggaagcagaaggggtggtgaaaacatctgatgatcttttcatcgtctcagctgaacagaaactagaagcctgcaagtggaagaaattgagtgaacttcaaatttatgtaaacgaaaagaaatacttactaggacttctgaaaactgaaggcataatcaaaagaaagaactaatcaaagaaagaactgttcttcaaagaacagcaatttgaagtgggaggtgtctatgagtgacagtggataatgtggttcccatgctgaaagaaacctttaatccaggactacatatgctggacttacatacttactaggattgggaaagagtttcaaaaatgtctccagcagttaaagaaagggatggctgttcagggctggcaatcagatcagcatctcgattagccaccatcagagatgcttgtacttgcagtggatgggaacaaatgagtaactggcttggaatacactaaacaggatgtgtcatcaaaccctgcccttcaggcttcagggaactttgagggaaaggtagcagaaagatggtcagagctggtgggggcggaagacaccaggaagcagcgccttcccgacacagcagagctgatgcgcggatgaactcacaaatggtggcagggtgctcaggtcaagccttgtggtgtctcgcagctaagaggggggagtgagtgaacgccatctcccatacctaactcagaagctatctctagttgccaaacctgacaatcttaatctaaccatcagaacccacgtgatggaagcgggcactaactctgtctgtacatgtcatggcacactatgcccacagagttacacacagttaacaaagtctttgtggggaaaaaaaaaacaaactagtattcaagtagaaatatgtttgctaagaatttgctttttcttttttcctttatcttggacaggtttcaagtagcttgggctggcttcaaatgttttatatatatagtcaaggacaaccttgagttctgattctcctgcctctgtttcctaagagctgggattacaggagtgtgcctccatttcccgtgttatgccatgctagggattgagcccagagccttgcgcatactaggcaaacgttctaccaacttagctatagctctattcagaagtttgccagtgatggggatcttgcagaagttgttctgagaactctgttttctttcccaggaggcgacgctgtgagtgaagaggacatgcttcgggcagctgtgaccatgtctttagaaactgctaaagacaacttgaaagcagaaagaaaaaaatagtacctttaaaagtcattttgctactcacactttgtaacattgtctgtgtgattacagtgtaagggccactttggcagtatgttcaccagaagagataaagacactgtagtggtttgtaagcagaaaggcagaaatgtgtcataggactaaggaacgatcgagatactagccaaagaggcagtcagcaatgaaagaaacttttctaaatgtcccgttttgtttttcaaatgtgcaatatctgactgaaattatggaatttttgttggctcttttggaccaactgattagctcttgccacagaacttgatcctataatgtttcgttttctctctgcattgggggtggcttggctcacttgagcttttacttcatttcagacctaccttttatgaaatgtcttttatatgtcttgttacagaaagatcagtctgtcttctcatacatatgtcgggcacgtggatgcttcctggtggtattttctctaatgtggtgatgtgttgcttttaaagcctttgttagtgggatcacatttcctaattgtgctgcattcctctactctgcagtcagctctgttcttgtaactgagcacgtgagcgtgctctgtctggatgccctgagagtggctgactcctggctggagcccttcctgtaccttccttcctctcttctccagctgagaaaagaggaggcagaggacacaaacagatttccttctacgtaacatgcaccatgaatgcaccacaggagaaactcgcccttcagtcctggtggtgggtttgtcctagtttttcatctgtgacaggagctttgtgttctaatcacgattaagtcctggaaaatagatgcctgcttcactttctaaaaattaaaaatatttttttttctttttctagtagaaaataggctgctaggatgatggtctagaatctgaaagtaatttactaataaaatatatttaaataatactgtgggttgacccttgcaatcatgtttaaatcgcttaagaattacagaagtcacaaagcttaaagggtctgtttgtaaataggaaagtccttagttttgataaacattaagcaggatgcagagctagtcttgctgggtcaatacgtggtatgatttgggtggaaattaactctgtgtctttgtcatggtgtcatagataccctgatacctgctttcccctccctcccctttgaagcccctttgaatggtgacttgtacataggtaaagtccaagaagagattgtagccagcttaggaaggggcagcatgctatagtgctctactggtgtgtgctctgcacacgtttttatcagggaaagttttggatgtaggatttattgctgtctaactgaaaaagatacaaatatttttatttatgcttatgaaatagctttttcttgataggatggatgtttggtttggtttggttgtgcgagggattgaacccagggcctccagtgtgctaggcaagcgccctacctctgagctatatccccagatccagaacaggggtttccttgtttgctttttgttgtttttcttagccattttgtgccaactacagttgttttttaaaaatttgcttcatgaaaaattaggcagtcctattttaaaatctatgaagttttctttcagtaattgcaaaggttcagaagagttgggcagctgtagggtgttagagttaggactttgcttacagttgattgctatactgaagtatgtaactactcccgtatgctgctcacatgtctagacattcattggcccttttcctttaccctttgaaaaatcacattaaactttccatacatttagattggtgtgctgcctgatgaaaaatgagaaagccaatatacacttcagctttaactttagagtttataaaatgttcatataacacaccctacttaaatcatgtatgaaatacagcatgttagtcttttattagaaatgttttaaagagaaactgagcacacactgaatctatttgagtgaagctttttagtttgttatatttatggcattgtccaggcagatccaaaatcaccattgaattgccatcctctttgggttgacctaggcttactaaacatttagatttcattattaatgagtagccagtatgaaaagatgccaatgcttattctagccacagtatccaaagtgtaggagttctatgacattctaattcataaccaggagttgctgtttatagtactgcaggacagacaggggcaagggactccactgccacggctggtcacagactcgactaacttttccatttgtttttttaccaattggaatacttaaatgtattgtatgtaatgaatactaaactactgataatcattttttttaaatctgtaacttgttctgccagataaaatgcgtacagccgtgatgctagtgttataaccaagtgtaaggaccctttggaaggccagacatggtgctgtgttcctttgatgctggtacttaggagaaatctgcagaggtaggcagatttcttcttgagttcaaggccagcctggtctacatagtaagttccagactttctggagctgcacagtaagaccctgtcttaaacaaaaaacaaacaaaccaacctttggaaagatcactttcatattttgggatgtcatgagcttatctatgtttcaaaattcagaatagctgtcctttggcctaaaccataaatctacacccccaacgacagtactatgcagacatttcactgatttaagttgtttgatacagtcagtgcaggtgaactccatgctaaagttttaagccttggccaaataacttacacctcacagactgtctgaggcggtgcttctttttttcctgaaaacttgatttttcttgatgaagccaaagttaatgagcatgaattctcaaaggagtagtctgctttgttttacttaatatcaggttgagtgaagtaagttttattcgtgtcagagtctaagccacacattttgaatacccacatgtttgatactatttaagtcatgctgtgccaagagttactaaattcttagaactggccctgtgccctgcctaaggccagacagggcagtgcggaacccaaatgtgctatctgagagtcttaagctaggaaatctgggtgttttaaattagtgagaggtttcagttagtgttgaaacctccagatccgacttgatgttaggcagtgtggatgtgctcagtggtagagcagttacctagtggcccaggccttgggttcagtctctaacactgcaaaaggagagcagtggctcacagtgtaacctacgtttagagagacatgaaaggaagtactttcaaagtgaatgtttgttgtaatttagtcctaacaagtgtagagctatgatatgtgaccttaattaagaaaaaccagattggatcagtagtatttttgttgtttttcatatttaacataaaaattcccttcatccctaatttgtttataattaaagagacaaattgattttgtattttttcaaagttttatacatattaaaagggttttgttgtagtctatcatgaatgaaaaggatatttttttttttaatttgaggaatacttttgtgtgtgtgtgcctaaaatggtctgtcattttaagaattagcacaaaaaaaaaattagctagttcctaaatgtatggaggtttaatagtaccagtacacagttgtgggtgaggcactagtgagaagtgtgtgggaaatgcagctgggtaggtgggactcacttgtctctgaatggtttaaaggtggtatttcctggaatttttttaatgattttttttttcaaggaagacagacattcgaaatgtgcttatcaaatttctacaacactggactaataggaataactttttttttaaaaaaaaaagactgttctgtataaataaaatatatgaaactcaagtgcaaaagccgtgaaaataaaaggcattgtcttctgtcaatgtgatgcactgtggccgagcagttccctcaggactcaactctgcagcccttcctcctgtgcctcaagtgtcggctgccactccacaggtcttccgtctgtcggctcctttgaaagccgggcttccaaagccctgttgaacactgagggttctggtgatgtgtgttaatgagttgtattttaaatatcagagattattaaataaagagaatgattttctattaa

SEQ ID NO: 4 - DNA, 14 bp, Artificial sequence
  Synthetic oligonucleotide
aagaaaccaaaccc

SEQ ID NO: 5 - DNA, 14 bp, Artificial sequence
  Synthetic oligonucleotide
aaagaaaccaaacc

SEQ ID NO: 6 - DNA, 14 bp, Artificial sequence
  Synthetic oligonucleotide
aaaagaaaccaaac

SEQ ID NO: 7 - DNA, 14 bp, Artificial sequence
  Synthetic oligonucleotide
caaaagaaaccaaa

SEQ ID NO: 8 - DNA, 14 bp, Artificial sequence
  Synthetic oligonucleotide
ccaaaagaaaccaa

SEQ ID NO: 9 - DNA, 14 bp, Artificial sequence
  Synthetic oligonucleotide
tccactcctaatac

SEQ ID NO: 10 - DNA, 14 bp, Artificial sequence
  Synthetic oligonucleotide
gtccactcctaata

SEQ ID NO: 11 - DNA, 14 bp, Artificial sequence
  Synthetic oligonucleotide
agtccactcctaat

SEQ ID NO: 12 - DNA, 14 bp, Artificial sequence
  Synthetic oligonucleotide
cagtccactcctaa

SEQ ID NO: 13 - DNA, 14 bp, Artificial sequence
  Synthetic oligonucleotide
ccagtccactccta

SEQ ID NO: 14 - DNA, 14 bp, Artificial sequence
  Synthetic oligonucleotide
actctttccaaaca

SEQ ID NO: 15 - DNA, 14 bp, Artificial sequence
  Synthetic oligonucleotide
aactctttccaaac

SEQ ID NO: 16 - DNA, 14 bp, Artificial sequence
  Synthetic oligonucleotide
caactctttccaaa

SEQ ID NO: 17 - DNA, 14 bp, Artificial sequence
  Synthetic oligonucleotide
gcaactctttccaa

SEQ ID NO: 18 - DNA, 14 bp, Artificial sequence
  Synthetic oligonucleotide
agcaactctttcca

SEQ ID NO: 19 - DNA, 14 bp, Artificial sequence
  Synthetic oligonucleotide
cagcaactctttcc

SEQ ID NO: 20 - DNA, 14 bp, Artificial sequence
  Synthetic oligonucleotide
ccagcaactctttc

SEQ ID NO: 21 - DNA, 14 bp, Artificial sequence
  Synthetic oligonucleotide
accagcaactcttt

SEQ ID NO: 22 - DNA, 14 bp, Artificial sequence
  Synthetic oligonucleotide
ctcctattaaataa

SEQ ID NO: 23 - DNA, 14 bp, Artificial sequence
  Synthetic oligonucleotide
cctcctattaaata

SEQ ID NO: 24 - DNA, 14 bp, Artificial sequence
  Synthetic oligonucleotide
tcctcctattaaat

SEQ ID NO: 25 - DNA, 14 bp, Artificial sequence
  Synthetic oligonucleotide
ctcctcctattaaa

SEQ ID NO: 26 - DNA, 14 bp, Artificial sequence
  Synthetic oligonucleotide
gctcctcctattaa

SEQ ID NO: 27 - DNA, 14 bp, Artificial sequence
  Synthetic oligonucleotide
tgctcctcctatta

SEQ ID NO: 28 - DNA, 14 bp, Artificial sequence
  Synthetic oligonucleotide
ttgctcctcctatt

SEQ ID NO: 29 - DNA, 14 bp, Artificial sequence
  Synthetic oligonucleotide
tttgctcctcctat

SEQ ID NO: 30 - DNA, 14 bp, Artificial sequence
  Synthetic oligonucleotide
ctttgctcctccta

SEQ ID NO: 31 - DNA, 14 bp, Artificial sequence
  Synthetic oligonucleotide
cctttgctcctcct

SEQ ID NO: 32 - DNA, 14 bp, Artificial sequence
  Synthetic oligonucleotide
ccctttgctcctcc

SEQ ID NO: 33 - DNA, 14 bp, Artificial sequence
  Synthetic oligonucleotide
accctttgctcctc

SEQ ID NO: 34 - DNA, 14 bp, Artificial sequence
  Synthetic oligonucleotide
aaccctttgctcct

SEQ ID NO: 35 - DNA, 14 bp, Artificial sequence
  Synthetic oligonucleotide
aaaccctttgctcc

SEQ ID NO: 36 - DNA, 14 bp, Artificial sequence
  Synthetic oligonucleotide
aaaaccctttgctc

SEQ ID NO: 37 - DNA, 14 bp, Artificial sequence
  Synthetic oligonucleotide
aaaaaccctttgct

SEQ ID NO: 38 - DNA, 14 bp, Artificial sequence
  Synthetic oligonucleotide
caaaaaccctttgc

SEQ ID NO: 39 - DNA, 14 bp, Artificial sequence
  Synthetic oligonucleotide
acaaaaaccctttg

SEQ ID NO: 40 - DNA, 14 bp, Artificial sequence
  Synthetic oligonucleotide
aacaaaaacccttt

SEQ ID NO: 41 - DNA, 14 bp, Artificial sequence
  Synthetic oligonucleotide
aaacaaaaaccctt

SEQ ID NO: 42 - DNA, 14 bp, Artificial sequence
  Synthetic oligonucleotide
aaaacaaaaaccct

SEQ ID NO: 43 - DNA, 14 bp, Artificial sequence
  Synthetic oligonucleotide
taaaacaaaaaccc

SEQ ID NO: 44 - DNA, 14 bp, Artificial sequence
  Synthetic oligonucleotide
ataaaacaaaaacc

SEQ ID NO: 45 - DNA, 14 bp, Artificial sequence
  Synthetic oligonucleotide
aataaaacaaaaac

SEQ ID NO: 46 - DNA, 14 bp, Artificial sequence
  Synthetic oligonucleotide
taataaaacaaaaa

SEQ ID NO: 47 - DNA, 14 bp, Artificial sequence
  Synthetic oligonucleotide
ttaataaaacaaaa

SEQ ID NO: 48 - DNA, 14 bp, Artificial sequence
  Synthetic oligonucleotide
tttaataaaacaaa

SEQ ID NO: 49 - DNA, 14 bp, Artificial sequence
  Synthetic oligonucleotide
atttaataaaacaa

SEQ ID NO: 50 - DNA, 14 bp, Artificial sequence
  Synthetic oligonucleotide
ttaaaataaaaatt

SEQ ID NO: 51 - DNA, 14 bp, Artificial sequence
  Synthetic oligonucleotide
tttaaaataaaaat

SEQ ID NO: 52 - DNA, 14 bp, Artificial sequence
  Synthetic oligonucleotide
ctttaaaataaaaa

SEQ ID NO: 53 - DNA, 14 bp, Artificial sequence
  Synthetic oligonucleotide
tctttaaaataaaa

SEQ ID NO: 54 - DNA, 14 bp, Artificial sequence
  Synthetic oligonucleotide
atctttaaaataaa

SEQ ID NO: 55 - DNA, 14 bp, Artificial sequence
  Synthetic oligonucleotide
catctttaaaataa

SEQ ID NO: 56 - DNA, 14 bp, Artificial sequence
  Synthetic oligonucleotide
ccatctttaaaata

SEQ ID NO: 57 - DNA, 14 bp, Artificial sequence
  Synthetic oligonucleotide
tctaacttaataaa

SEQ ID NO: 58 - DNA, 14 bp, Artificial sequence
  Synthetic oligonucleotide
ttctaacttaataa

SEQ ID NO: 59 - DNA, 14 bp, Artificial sequence
  Synthetic oligonucleotide
attctaacttaata

SEQ ID NO: 60 - DNA, 14 bp, Artificial sequence
  Synthetic oligonucleotide
cattctaacttaat

SEQ ID NO: 61 - DNA, 14 bp, Artificial sequence
  Synthetic oligonucleotide
acattctaacttaa

SEQ ID NO: 62 - DNA, 14 bp, Artificial sequence
  Synthetic oligonucleotide
tacattctaactta

SEQ ID NO: 63 - DNA, 14 bp, Artificial sequence
  Synthetic oligonucleotide
ttacattctaactt

SEQ ID NO: 64 - DNA, 14 bp, Artificial sequence
  Synthetic oligonucleotide
tttacattctaact

SEQ ID NO: 65 - DNA, 14 bp, Artificial sequence
  Synthetic oligonucleotide
ttttacattctaac

SEQ ID NO: 66 - DNA, 14 bp, Artificial sequence
  Synthetic oligonucleotide
tttttacattctaa

SEQ ID NO: 67 - DNA, 14 bp, Artificial sequence
  Synthetic oligonucleotide
gtttttacattcta

SEQ ID NO: 68 - DNA, 14 bp, Artificial sequence
  Synthetic oligonucleotide
tgtttttacattct

SEQ ID NO: 69 - DNA, 14 bp, Artificial sequence
  Synthetic oligonucleotide
ctgtttttacattc

SEQ ID NO: 70 - DNA, 14 bp, Artificial sequence
  Synthetic oligonucleotide
ttcaaatatttatt

SEQ ID NO: 71 - DNA, 14 bp, Artificial sequence
  Synthetic oligonucleotide
attcaaatatttat

SEQ ID NO: 72 - DNA, 14 bp, Artificial sequence
  Synthetic oligonucleotide
cattcaaatattta

SEQ ID NO: 73 - DNA, 14 bp, Artificial sequence
  Synthetic oligonucleotide
ccattcaaatattt

SEQ ID NO: 74 - DNA, 14 bp, Artificial sequence
  Synthetic oligonucleotide
cccattcaaatatt

SEQ ID NO: 75 - DNA, 14 bp, Artificial sequence
  Synthetic oligonucleotide
ccccattcaaatat

SEQ ID NO: 76 - DNA, 14 bp, Artificial sequence
  Synthetic oligonucleotide
gccccattcaaata

SEQ ID NO: 77 - DNA, 14 bp, Artificial sequence
  Synthetic oligonucleotide
tatacatttttttc

SEQ ID NO: 78 - DNA, 14 bp, Artificial sequence
  Synthetic oligonucleotide
atatacattttttt

SEQ ID NO: 79 - DNA, 14 bp, Artificial sequence
  Synthetic oligonucleotide
tatatacatttttt

SEQ ID NO: 80 - DNA, 14 bp, Artificial sequence
  Synthetic oligonucleotide
atatatacattttt

SEQ ID NO: 81 - DNA, 14 bp, Artificial sequence
  Synthetic oligonucleotide
aatatatacatttt

SEQ ID NO: 82 - DNA, 14 bp, Artificial sequence
  Synthetic oligonucleotide
aaatatatacattt

SEQ ID NO: 83 - DNA, 14 bp, Artificial sequence
  Synthetic oligonucleotide
caaatatatacatt

SEQ ID NO: 84 - DNA, 14 bp, Artificial sequence
  Synthetic oligonucleotide
tcaaatatatacat

SEQ ID NO: 85 - DNA, 14 bp, Artificial sequence
  Synthetic oligonucleotide
ttcaaatatataca

SEQ ID NO: 86 - DNA, 14 bp, Artificial sequence
  Synthetic oligonucleotide
attcaaatatatac

SEQ ID NO: 87 - DNA, 14 bp, Artificial sequence
  Synthetic oligonucleotide
cattcaaatatata

SEQ ID NO: 88 - DNA, 14 bp, Artificial sequence
  Synthetic oligonucleotide
ccattcaaatatat

SEQ ID NO: 89 - DNA, 14 bp, Artificial sequence
  Synthetic oligonucleotide
tccattcaaatata

SEQ ID NO: 90 - DNA, 14 bp, Artificial sequence
  Synthetic oligonucleotide
atccattcaaatat

SEQ ID NO: 91 - DNA, 14 bp, Artificial sequence
  Synthetic oligonucleotide
tatccattcaaata

SEQ ID NO: 92 - DNA, 14 bp, Artificial sequence
  Synthetic oligonucleotide
ttatccattcaaat

SEQ ID NO: 93 - DNA, 14 bp, Artificial sequence
  Synthetic oligonucleotide
tttatccattcaaa

SEQ ID NO: 94 - DNA, 14 bp, Artificial sequence
  Synthetic oligonucleotide
ctttatccattcaa

SEQ ID NO: 95 - DNA, 14 bp, Artificial sequence
  Synthetic oligonucleotide
tctttatccattca

SEQ ID NO: 96 - DNA, 14 bp, Artificial sequence
  Synthetic oligonucleotide
ctctttatccattc

SEQ ID NO: 97 - DNA, 14 bp, Artificial sequence
  Synthetic oligonucleotide
tctctttatccatt

SEQ ID NO: 98 - DNA, 14 bp, Artificial sequence
  Synthetic oligonucleotide
ccatatatatctca

SEQ ID NO: 99 - DNA, 14 bp, Artificial sequence
  Synthetic oligonucleotide
accatatatatctc

SEQ ID NO: 100 - DNA, 14 bp, Artificial sequence
  Synthetic oligonucleotide
caccatatatatct

SEQ ID NO: 101 - DNA, 14 bp, Artificial sequence
  Synthetic oligonucleotide
gcaccatatatatc

SEQ ID NO: 102 - DNA, 14 bp, Artificial sequence
  Synthetic oligonucleotide
agcaccatatatat

SEQ ID NO: 103 - DNA, 14 bp, Artificial sequence
  Synthetic oligonucleotide
cagcaccatatata

SEQ ID NO: 104 - DNA, 14 bp, Artificial sequence
  Synthetic oligonucleotide
acagcaccatatat

SEQ ID NO: 105 - DNA, 14 bp, Artificial sequence
  Synthetic oligonucleotide
aacagcaccatata

SEQ ID NO: 106 - DNA, 14 bp, Artificial sequence
  Synthetic oligonucleotide
aaaacaaacaacaa

SEQ ID NO: 107 - DNA, 14 bp, Artificial sequence
  Synthetic oligonucleotide
taaaacaaacaaca

SEQ ID NO: 108 - DNA, 14 bp, Artificial sequence
  Synthetic oligonucleotide
ctaaaacaaacaac

SEQ ID NO: 109 - DNA, 14 bp, Artificial sequence
  Synthetic oligonucleotide
actaaaacaaacaa

SEQ ID NO: 110 - DNA, 14 bp, Artificial sequence
  Synthetic oligonucleotide
aactaaaacaaaca

SEQ ID NO: 111 - DNA, 14 bp, Artificial sequence
  Synthetic oligonucleotide
gaactaaaacaaac

SEQ ID NO: 112 - DNA, 14 bp, Artificial sequence
  Synthetic oligonucleotide
agaactaaaacaaa

SEQ ID NO: 113 - DNA, 14 bp, Artificial sequence
  Synthetic oligonucleotide
cagaactaaaacaa

SEQ ID NO: 114 - DNA, 14 bp, Artificial sequence
  Synthetic oligonucleotide
ccagaactaaaaca

SEQ ID NO: 115 - DNA, 14 bp, Artificial sequence
  Synthetic oligonucleotide
accagaactaaaac

SEQ ID NO: 116 - DNA, 14 bp, Artificial sequence
  Synthetic oligonucleotide
atgttattatcccc

SEQ ID NO: 117 - DNA, 14 bp, Artificial sequence
  Synthetic oligonucleotide
tatgttattatccc

SEQ ID NO: 118 - DNA, 14 bp, Artificial sequence
  Synthetic oligonucleotide
ctatgttattatcc

SEQ ID NO: 119 - DNA, 14 bp, Artificial sequence
  Synthetic oligonucleotide
tctatgttattatc

SEQ ID NO: 120 - DNA, 14 bp, Artificial sequence
  Synthetic oligonucleotide
tacactctaactct

SEQ ID NO: 121 - DNA, 14 bp, Artificial sequence
  Synthetic oligonucleotide
ctacactctaactc

SEQ ID NO: 122 - DNA, 14 bp, Artificial sequence
  Synthetic oligonucleotide
tctacactctaact

SEQ ID NO: 123 - DNA, 14 bp, Artificial sequence
  Synthetic oligonucleotide
ctctacactctaac

SEQ ID NO: 124 - DNA, 14 bp, Artificial sequence
  Synthetic oligonucleotide
tctctacactctaa

SEQ ID NO: 125 - DNA, 14 bp, Artificial sequence
  Synthetic oligonucleotide
ttctctacactcta

SEQ ID NO: 126 - DNA, 14 bp, Artificial sequence
  Synthetic oligonucleotide
cttctctacactct

SEQ ID NO: 127 - DNA, 14 bp, Artificial sequence
  Synthetic oligonucleotide
ccttctctacactc

SEQ ID NO: 128 - DNA, 14 bp, Artificial sequence
  Synthetic oligonucleotide
tacaacacaaatca

SEQ ID NO: 129 - DNA, 14 bp, Artificial sequence
  Synthetic oligonucleotide
ctacaacacaaatc

SEQ ID NO: 130 - DNA, 14 bp, Artificial sequence
  Synthetic oligonucleotide
actacaacacaaat

SEQ ID NO: 131 - DNA, 14 bp, Artificial sequence
  Synthetic oligonucleotide
aactacaacacaaa

SEQ ID NO: 132 - DNA, 14 bp, Artificial sequence
  Synthetic oligonucleotide
taactacaacacaa

SEQ ID NO: 133 - DNA, 14 bp, Artificial sequence
  Synthetic oligonucleotide
ctaactacaacaca

SEQ ID NO: 134 - DNA, 14 bp, Artificial sequence
  Synthetic oligonucleotide
actaactacaacac

SEQ ID NO: 135 - DNA, 14 bp, Artificial sequence
  Synthetic oligonucleotide
tactaactacaaca

SEQ ID NO: 136 - DNA, 14 bp, Artificial sequence
  Synthetic oligonucleotide
ctactaactacaac

SEQ ID NO: 137 - DNA, 14 bp, Artificial sequence
  Synthetic oligonucleotide
actactaactacaa

SEQ ID NO: 138 - DNA, 14 bp, Artificial sequence
  Synthetic oligonucleotide
cactactaactaca

SEQ ID NO: 139 - DNA, 14 bp, Artificial sequence
  Synthetic oligonucleotide
acactactaactac

SEQ ID NO: 140 - DNA, 14 bp, Artificial sequence
  Synthetic oligonucleotide
gacactactaacta

SEQ ID NO: 141 - DNA, 14 bp, Artificial sequence
  Synthetic oligonucleotide
agacactactaact

SEQ ID NO: 142 - DNA, 14 bp, Artificial sequence
  Synthetic oligonucleotide
tttacccccaacct

SEQ ID NO: 143 - DNA, 14 bp, Artificial sequence
  Synthetic oligonucleotide
atttacccccaacc

SEQ ID NO: 144 - DNA, 14 bp, Artificial sequence
  Synthetic oligonucleotide
catttacccccaac

SEQ ID NO: 145 - DNA, 14 bp, Artificial sequence
  Synthetic oligonucleotide
tcatttacccccaa

SEQ ID NO: 146 - DNA, 14 bp, Artificial sequence
  Synthetic oligonucleotide
atcatttaccccca

SEQ ID NO: 147 - DNA, 14 bp, Artificial sequence
  Synthetic oligonucleotide
aatcatttaccccc

SEQ ID NO: 148 - DNA, 14 bp, Artificial sequence
  Synthetic oligonucleotide
aaatcatttacccc

SEQ ID NO: 149 - DNA, 14 bp, Artificial sequence
  Synthetic oligonucleotide
caaatcatttaccc

SEQ ID NO: 150 - DNA, 14 bp, Artificial sequence
  Synthetic oligonucleotide
ccaaatcatttacc

SEQ ID NO: 151 - DNA, 14 bp, Artificial sequence
  Synthetic oligonucleotide
accaaatcatttac

SEQ ID NO: 152 - DNA, 14 bp, Artificial sequence
  Synthetic oligonucleotide
taccaaatcattta

SEQ ID NO: 153 - DNA, 14 bp, Artificial sequence
  Synthetic oligonucleotide
ctaccaaatcattt

SEQ ID NO: 154 - DNA, 14 bp, Artificial sequence
  Synthetic oligonucleotide
gctaccaaatcatt

SEQ ID NO: 155 - DNA, 14 bp, Artificial sequence
  Synthetic oligonucleotide
tgctaccaaatcat

SEQ ID NO: 156 - DNA, 14 bp, Artificial sequence
  Synthetic oligonucleotide
ctgctaccaaatca

SEQ ID NO: 157 - DNA, 14 bp, Artificial sequence
  Synthetic oligonucleotide
actgctaccaaatc

SEQ ID NO: 158 - DNA, 14 bp, Artificial sequence
  Synthetic oligonucleotide
aactgctaccaaat

SEQ ID NO: 159 - DNA, 14 bp, Artificial sequence
  Synthetic oligonucleotide
aagctttaatcaaa

SEQ ID NO: 160 - DNA, 14 bp, Artificial sequence
  Synthetic oligonucleotide
caagctttaatcaa

SEQ ID NO: 161 - DNA, 14 bp, Artificial sequence
  Synthetic oligonucleotide
tcaagctttaatca

SEQ ID NO: 162 - DNA, 14 bp, Artificial sequence
  Synthetic oligonucleotide
atcaagctttaatc

SEQ ID NO: 163 - DNA, 14 bp, Artificial sequence
  Synthetic oligonucleotide
catcaagctttaat

SEQ ID NO: 164 - DNA, 14 bp, Artificial sequence
  Synthetic oligonucleotide
tcaaactatcccca

SEQ ID NO: 165 - DNA, 14 bp, Artificial sequence
  Synthetic oligonucleotide
ctcaaactatcccc

SEQ ID NO: 166 - DNA, 14 bp, Artificial sequence
  Synthetic oligonucleotide
tctcaaactatccc

SEQ ID NO: 167 - DNA, 14 bp, Artificial sequence
  Synthetic oligonucleotide
atctcaaactatcc

SEQ ID NO: 168 - DNA, 14 bp, Artificial sequence
  Synthetic oligonucleotide
tatctcaaactatc

SEQ ID NO: 169 - DNA, 14 bp, Artificial sequence
  Synthetic oligonucleotide
ttatctcaaactat

SEQ ID NO: 170 - DNA, 14 bp, Artificial sequence
  Synthetic oligonucleotide
cttatctcaaacta

SEQ ID NO: 171 - DNA, 14 bp, Artificial sequence
  Synthetic oligonucleotide
ccttatctcaaact

SEQ ID NO: 172 - DNA, 14 bp, Artificial sequence
  Synthetic oligonucleotide
cccttatctcaaac

SEQ ID NO: 173 - DNA, 14 bp, Artificial sequence
  Synthetic oligonucleotide
gcccttatctcaaa

SEQ ID NO: 174 - DNA, 14 bp, Artificial sequence
  Synthetic oligonucleotide
tgcccttatctcaa

SEQ ID NO: 175 - DNA, 14 bp, Artificial sequence
  Synthetic oligonucleotide
caaacttcatcaaa

SEQ ID NO: 176 - DNA, 14 bp, Artificial sequence
  Synthetic oligonucleotide
tcaaacttcatcaa

SEQ ID NO: 177 - DNA, 14 bp, Artificial sequence
  Synthetic oligonucleotide
atcaaacttcatca

SEQ ID NO: 178 - DNA, 14 bp, Artificial sequence
  Synthetic oligonucleotide
aatcaaacttcatc

SEQ ID NO: 179 - DNA, 14 bp, Artificial sequence
  Synthetic oligonucleotide
aaatcaaacttcat

SEQ ID NO: 180 - DNA, 14 bp, Artificial sequence
  Synthetic oligonucleotide
gaaatcaaacttca

SEQ ID NO: 181 - DNA, 14 bp, Artificial sequence
  Synthetic oligonucleotide
tgaaatcaaacttc

SEQ ID NO: 182 - DNA, 14 bp, Artificial sequence
  Synthetic oligonucleotide
ttgaaatcaaactt

SEQ ID NO: 183 - DNA, 14 bp, Artificial sequence
  Synthetic oligonucleotide
aacacaaatttcct

SEQ ID NO: 184 - DNA, 14 bp, Artificial sequence
  Synthetic oligonucleotide
taacacaaatttcc

SEQ ID NO: 185 - DNA, 14 bp, Artificial sequence
  Synthetic oligonucleotide
ctaacacaaatttc

SEQ ID NO: 186 - DNA, 14 bp, Artificial sequence
  Synthetic oligonucleotide
gctaacacaaattt

SEQ ID NO: 187 - DNA, 14 bp, Artificial sequence
  Synthetic oligonucleotide
tgctaacacaaatt

SEQ ID NO: 188 - DNA, 14 bp, Artificial sequence
  Synthetic oligonucleotide
ttgctaacacaaat

SEQ ID NO: 189 - DNA, 14 bp, Artificial sequence
  Synthetic oligonucleotide
tttgctaacacaaa

SEQ ID NO: 190 - DNA, 14 bp, Artificial sequence
  Synthetic oligonucleotide
ctttgctaacacaa

SEQ ID NO: 191 - DNA, 14 bp, Artificial sequence
  Synthetic oligonucleotide
cctttgctaacaca

SEQ ID NO: 192 - DNA, 14 bp, Artificial sequence
  Synthetic oligonucleotide
taactaataattat

SEQ ID NO: 193 - DNA, 14 bp, Artificial sequence
  Synthetic oligonucleotide
ataactaataatta

SEQ ID NO: 194 - DNA, 14 bp, Artificial sequence
  Synthetic oligonucleotide
aataactaataatt

SEQ ID NO: 195 - DNA, 14 bp, Artificial sequence
  Synthetic oligonucleotide
taataactaataat

SEQ ID NO: 196 - DNA, 14 bp, Artificial sequence
  Synthetic oligonucleotide
ataataactaataa

SEQ ID NO: 197 - DNA, 14 bp, Artificial sequence
  Synthetic oligonucleotide
aataataactaata

SEQ ID NO: 198 - DNA, 14 bp, Artificial sequence
  Synthetic oligonucleotide
caataataactaat

SEQ ID NO: 199 - DNA, 14 bp, Artificial sequence
  Synthetic oligonucleotide
ccaataataactaa

SEQ ID NO: 200 - DNA, 14 bp, Artificial sequence
  Synthetic oligonucleotide
accaataataacta

SEQ ID NO: 201 - DNA, 14 bp, Artificial sequence
  Synthetic oligonucleotide
aaccaataataact

SEQ ID NO: 202 - DNA, 14 bp, Artificial sequence
  Synthetic oligonucleotide
taaccaataataac

SEQ ID NO: 203 - DNA, 14 bp, Artificial sequence
  Synthetic oligonucleotide
ataaccaataataa

SEQ ID NO: 204 - DNA, 14 bp, Artificial sequence
  Synthetic oligonucleotide
tataaccaataata

SEQ ID NO: 205 - DNA, 14 bp, Artificial sequence
  Synthetic oligonucleotide
gtataaccaataat

SEQ ID NO: 206 - DNA, 14 bp, Artificial sequence
  Synthetic oligonucleotide
acatcacacaattt

SEQ ID NO: 207 - DNA, 14 bp, Artificial sequence
  Synthetic oligonucleotide
gacatcacacaatt

SEQ ID NO: 208 - DNA, 14 bp, Artificial sequence
  Synthetic oligonucleotide
tgacatcacacaat

SEQ ID NO: 209 - DNA, 14 bp, Artificial sequence
  Synthetic oligonucleotide
ctgacatcacacaa

SEQ ID NO: 210 - DNA, 14 bp, Artificial sequence
  Synthetic oligonucleotide
tctgacatcacaca

SEQ ID NO: 211 - DNA, 14 bp, Artificial sequence
  Synthetic oligonucleotide
atctgacatcacac

SEQ ID NO: 212 - DNA, 14 bp, Artificial sequence
  Synthetic oligonucleotide
ttccttaacccaac

SEQ ID NO: 213 - DNA, 14 bp, Artificial sequence
  Synthetic oligonucleotide
attccttaacccaa

SEQ ID NO: 214 - DNA, 14 bp, Artificial sequence
  Synthetic oligonucleotide
tattccttaaccca

SEQ ID NO: 215 - DNA, 14 bp, Artificial sequence
  Synthetic oligonucleotide
ctattccttaaccc

SEQ ID NO: 216 - DNA, 14 bp, Artificial sequence
  Synthetic oligonucleotide
tctattccttaacc

SEQ ID NO: 217 - DNA, 14 bp, Artificial sequence
  Synthetic oligonucleotide
gtctattccttaac

SEQ ID NO: 218 - DNA, 14 bp, Artificial sequence
  Synthetic oligonucleotide
catcaaatctcata

SEQ ID NO: 219 - DNA, 14 bp, Artificial sequence
  Synthetic oligonucleotide
gcatcaaatctcat

SEQ ID NO: 220 - DNA, 14 bp, Artificial sequence
  Synthetic oligonucleotide
tgcatcaaatctca

SEQ ID NO: 221 - DNA, 14 bp, Artificial sequence
  Synthetic oligonucleotide
atgcatcaaatctc

SEQ ID NO: 222 - DNA, 14 bp, Artificial sequence
  Synthetic oligonucleotide
aatgcatcaaatct

SEQ ID NO: 223 - DNA, 14 bp, Artificial sequence
  Synthetic oligonucleotide
attttaaacaaaca

SEQ ID NO: 224 - DNA, 14 bp, Artificial sequence
  Synthetic oligonucleotide
tattttaaacaaac

SEQ ID NO: 225 - DNA, 14 bp, Artificial sequence
  Synthetic oligonucleotide
ttattttaaacaaa

SEQ ID NO: 226 - DNA, 14 bp, Artificial sequence
  Synthetic oligonucleotide
attattttaaacaa

SEQ ID NO: 227 - DNA, 14 bp, Artificial sequence
  Synthetic oligonucleotide
aattattttaaaca

SEQ ID NO: 228 - DNA, 14 bp, Artificial sequence
  Synthetic oligonucleotide
gaattattttaaac

SEQ ID NO: 229 - DNA, 14 bp, Artificial sequence
  Synthetic oligonucleotide
ttttacaaatctac

SEQ ID NO: 230 - DNA, 14 bp, Artificial sequence
  Synthetic oligonucleotide
attttacaaatcta

SEQ ID NO: 231 - DNA, 14 bp, Artificial sequence
  Synthetic oligonucleotide
tattttacaaatct

SEQ ID NO: 232 - DNA, 14 bp, Artificial sequence
  Synthetic oligonucleotide
ttattttacaaatc

SEQ ID NO: 233 - DNA, 14 bp, Artificial sequence
  Synthetic oligonucleotide
tttattttacaaat

SEQ ID NO: 234 - DNA, 14 bp, Artificial sequence
  Synthetic oligonucleotide
atttattttacaaa

SEQ ID NO: 235 - DNA, 14 bp, Artificial sequence
  Synthetic oligonucleotide
catttattttacaa

SEQ ID NO: 236 - DNA, 14 bp, Artificial sequence
  Synthetic oligonucleotide
acatttattttaca

SEQ ID NO: 237 - DNA, 14 bp, Artificial sequence
  Synthetic oligonucleotide
aacatttattttac

SEQ ID NO: 238 - DNA, 14 bp, Artificial sequence
  Synthetic oligonucleotide
taacatttatttta

SEQ ID NO: 239 - DNA, 14 bp, Artificial sequence
  Synthetic oligonucleotide
aatttaatcattaa

SEQ ID NO: 240 - DNA, 14 bp, Artificial sequence
  Synthetic oligonucleotide
taatttaatcatta

SEQ ID NO: 241 - DNA, 14 bp, Artificial sequence
  Synthetic oligonucleotide
ataatttaatcatt

SEQ ID NO: 242 - DNA, 14 bp, Artificial sequence
  Synthetic oligonucleotide
aataatttaatcat

SEQ ID NO: 243 - DNA, 14 bp, Artificial sequence
  Synthetic oligonucleotide
aaataatttaatca

SEQ ID NO: 244 - DNA, 14 bp, Artificial sequence
  Synthetic oligonucleotide
taaataatttaatc

SEQ ID NO: 245 - DNA, 14 bp, Artificial sequence
  Synthetic oligonucleotide
ctaaataatttaat

SEQ ID NO: 246 - DNA, 14 bp, Artificial sequence
  Synthetic oligonucleotide
cctaaataatttaa

SEQ ID NO: 247 - DNA, 14 bp, Artificial sequence
  Synthetic oligonucleotide
ccctaaataattta

SEQ ID NO: 248 - DNA, 14 bp, Artificial sequence
  Synthetic oligonucleotide
cccctaaataattt

SEQ ID NO: 249 - DNA, 14 bp, Artificial sequence
  Synthetic oligonucleotide
tcccctaaataatt

SEQ ID NO: 250 - DNA, 14 bp, Artificial sequence
  Synthetic oligonucleotide
tatataaaaatcta

SEQ ID NO: 251 - DNA, 14 bp, Artificial sequence
  Synthetic oligonucleotide
ctatataaaaatct

SEQ ID NO: 252 - DNA, 14 bp, Artificial sequence
  Synthetic oligonucleotide
tctatataaaaatc

SEQ ID NO: 253 - DNA, 14 bp, Artificial sequence
  Synthetic oligonucleotide
atctatataaaaat

SEQ ID NO: 254 - DNA, 14 bp, Artificial sequence
  Synthetic oligonucleotide
tatctatataaaaa

SEQ ID NO: 255 - DNA, 14 bp, Artificial sequence
  Synthetic oligonucleotide
ttatctatataaaa

SEQ ID NO: 256 - DNA, 14 bp, Artificial sequence
  Synthetic oligonucleotide
tttatctatataaa

SEQ ID NO: 257 - DNA, 14 bp, Artificial sequence
  Synthetic oligonucleotide
ccccactctaatat

SEQ ID NO: 258 - DNA, 14 bp, Artificial sequence
  Synthetic oligonucleotide
gccccactctaata

SEQ ID NO: 259 - DNA, 14 bp, Artificial sequence
  Synthetic oligonucleotide
tgccccactctaat

SEQ ID NO: 260 - DNA, 14 bp, Artificial sequence
  Synthetic oligonucleotide
atgccccactctaa

SEQ ID NO: 261 - DNA, 14 bp, Artificial sequence
  Synthetic oligonucleotide
aatgccccactcta

SEQ ID NO: 262 - DNA, 14 bp, Artificial sequence
  Synthetic oligonucleotide
aaatgccccactct

SEQ ID NO: 263 - DNA, 14 bp, Artificial sequence
  Synthetic oligonucleotide
taaatgccccactc

SEQ ID NO: 264 - DNA, 14 bp, Artificial sequence
  Synthetic oligonucleotide
ttaaatgccccact

SEQ ID NO: 265 - DNA, 14 bp, Artificial sequence
  Synthetic oligonucleotide
atataaccaccaaa

SEQ ID NO: 266 - DNA, 14 bp, Artificial sequence
  Synthetic oligonucleotide
tatataaccaccaa

SEQ ID NO: 267 - DNA, 14 bp, Artificial sequence
  Synthetic oligonucleotide
atatataaccacca

SEQ ID NO: 268 - DNA, 14 bp, Artificial sequence
  Synthetic oligonucleotide
tatatataaccacc

SEQ ID NO: 269 - DNA, 14 bp, Artificial sequence
  Synthetic oligonucleotide
atatatataaccac

SEQ ID NO: 270 - DNA, 14 bp, Artificial sequence
  Synthetic oligonucleotide
aaaattcactatct

SEQ ID NO: 271 - DNA, 14 bp, Artificial sequence
  Synthetic oligonucleotide
gaaaattcactatc

SEQ ID NO: 272 - DNA, 14 bp, Artificial sequence
  Synthetic oligonucleotide
tgaaaattcactat

SEQ ID NO: 273 - DNA, 14 bp, Artificial sequence
  Synthetic oligonucleotide
ctgaaaattcacta

SEQ ID NO: 274 - DNA, 14 bp, Artificial sequence
  Synthetic oligonucleotide
tctgaaaattcact

SEQ ID NO: 275 - DNA, 14 bp, Artificial sequence
  Synthetic oligonucleotide
tactatatacatct

SEQ ID NO: 276 - DNA, 14 bp, Artificial sequence
  Synthetic oligonucleotide
ctactatatacatc

SEQ ID NO: 277 - DNA, 14 bp, Artificial sequence
  Synthetic oligonucleotide
tctactatatacat

SEQ ID NO: 278 - DNA, 14 bp, Artificial sequence
  Synthetic oligonucleotide
gtctactatataca

SEQ ID NO: 279 - DNA, 14 bp, Artificial sequence
  Synthetic oligonucleotide
agtctactatatac

SEQ ID NO: 280 - DNA, 14 bp, Artificial sequence
  Synthetic oligonucleotide
tagtctactatata

SEQ ID NO: 281 - DNA, 14 bp, Artificial sequence
  Synthetic oligonucleotide
ctagtctactatat

SEQ ID NO: 282 - DNA, 14 bp, Artificial sequence
  Synthetic oligonucleotide
actagtctactata

SEQ ID NO: 283 - DNA, 14 bp, Artificial sequence
  Synthetic oligonucleotide
aactagtctactat

SEQ ID NO: 284 - DNA, 14 bp, Artificial sequence
  Synthetic oligonucleotide
tattctacccataa

SEQ ID NO: 285 - DNA, 14 bp, Artificial sequence
  Synthetic oligonucleotide
atattctacccata

SEQ ID NO: 286 - DNA, 14 bp, Artificial sequence
  Synthetic oligonucleotide
tatattctacccat

SEQ ID NO: 287 - DNA, 14 bp, Artificial sequence
  Synthetic oligonucleotide
gtatattctaccca

SEQ ID NO: 288 - DNA, 14 bp, Artificial sequence
  Synthetic oligonucleotide
tgtatattctaccc

SEQ ID NO: 289 - DNA, 14 bp, Artificial sequence
  Synthetic oligonucleotide
atgtatattctacc

SEQ ID NO: 290 - DNA, 14 bp, Artificial sequence
  Synthetic oligonucleotide
ccacacaattccta

SEQ ID NO: 291 - DNA, 14 bp, Artificial sequence
  Synthetic oligonucleotide
accacacaattcct

SEQ ID NO: 292 - DNA, 14 bp, Artificial sequence
  Synthetic oligonucleotide
aaccacacaattcc

SEQ ID NO: 293 - DNA, 14 bp, Artificial sequence
  Synthetic oligonucleotide
aaaccacacaattc

SEQ ID NO: 294 - DNA, 14 bp, Artificial sequence
  Synthetic oligonucleotide
aaaaccacacaatt

SEQ ID NO: 295 - DNA, 14 bp, Artificial sequence
  Synthetic oligonucleotide
gaaaaccacacaat

SEQ ID NO: 296 - DNA, 14 bp, Artificial sequence
  Synthetic oligonucleotide
agaaaaccacacaa

SEQ ID NO: 297 - DNA, 14 bp, Artificial sequence
  Synthetic oligonucleotide
cagaaaaccacaca

SEQ ID NO: 298 - DNA, 14 bp, Artificial sequence
  Synthetic oligonucleotide
ccagaaaaccacac

SEQ ID NO: 299 - DNA, 14 bp, Artificial sequence
  Synthetic oligonucleotide
tccagaaaaccaca

SEQ ID NO: 300 - DNA, 14 bp, Artificial sequence
  Synthetic oligonucleotide
aaatccataaaaaa

SEQ ID NO: 301 - DNA, 14 bp, Artificial sequence
  Synthetic oligonucleotide
taaatccataaaaa

SEQ ID NO: 302 - DNA, 14 bp, Artificial sequence
  Synthetic oligonucleotide
ctaaatccataaaa

SEQ ID NO: 303 - DNA, 14 bp, Artificial sequence
  Synthetic oligonucleotide
actaaatccataaa

SEQ ID NO: 304 - DNA, 14 bp, Artificial sequence
  Synthetic oligonucleotide
cactaaatccataa

SEQ ID NO: 305 - DNA, 14 bp, Artificial sequence
  Synthetic oligonucleotide
tcactaaatccata

SEQ ID NO: 306 - DNA, 14 bp, Artificial sequence
  Synthetic oligonucleotide
atcactaaatccat

SEQ ID NO: 307 - DNA, 14 bp, Artificial sequence
  Synthetic oligonucleotide
tatcactaaatcca

SEQ ID NO: 308 - DNA, 14 bp, Artificial sequence
  Synthetic oligonucleotide
atatcactaaatcc

SEQ ID NO: 309 - DNA, 14 bp, Artificial sequence
  Synthetic oligonucleotide
tatatcactaaatc

SEQ ID NO: 310 - DNA, 14 bp, Artificial sequence
  Synthetic oligonucleotide
atatatcactaaat

SEQ ID NO: 311 - DNA, 14 bp, Artificial sequence
  Synthetic oligonucleotide
gatatatcactaaa

SEQ ID NO: 312 - DNA, 14 bp, Artificial sequence
  Synthetic oligonucleotide
agatatatcactaa

SEQ ID NO: 313 - DNA, 14 bp, Artificial sequence
  Synthetic oligonucleotide
tagatatatcacta

SEQ ID NO: 314 - DNA, 14 bp, Artificial sequence
  Synthetic oligonucleotide
tataaatttctcta

SEQ ID NO: 315 - DNA, 14 bp, Artificial sequence
  Synthetic oligonucleotide
atataaatttctct

SEQ ID NO: 316 - DNA, 14 bp, Artificial sequence
  Synthetic oligonucleotide
tatataaatttctc

SEQ ID NO: 317 - DNA, 14 bp, Artificial sequence
  Synthetic oligonucleotide
atatataaatttct

SEQ ID NO: 318 - DNA, 14 bp, Artificial sequence
  Synthetic oligonucleotide
catatataaatttc

SEQ ID NO: 319 - DNA, 14 bp, Artificial sequence
  Synthetic oligonucleotide
tcatatataaattt

SEQ ID NO: 320 - DNA, 14 bp, Artificial sequence
  Synthetic oligonucleotide
ctccattccaaatt

SEQ ID NO: 321 - DNA, 14 bp, Artificial sequence
  Synthetic oligonucleotide
actccattccaaat

SEQ ID NO: 322 - DNA, 14 bp, Artificial sequence
  Synthetic oligonucleotide
cactccattccaaa

SEQ ID NO: 323 - DNA, 14 bp, Artificial sequence
  Synthetic oligonucleotide
ccactccattccaa

SEQ ID NO: 324 - DNA, 14 bp, Artificial sequence
  Synthetic oligonucleotide
accactccattcca

SEQ ID NO: 325 - DNA, 14 bp, Artificial sequence
  Synthetic oligonucleotide
aaccactccattcc

SEQ ID NO: 326 - DNA, 14 bp, Artificial sequence
  Synthetic oligonucleotide
aaaccactccattc

SEQ ID NO: 327 - DNA, 14 bp, Artificial sequence
  Synthetic oligonucleotide
tcacacaaccatat

SEQ ID NO: 328 - DNA, 14 bp, Artificial sequence
  Synthetic oligonucleotide
atcacacaaccata

SEQ ID NO: 329 - DNA, 14 bp, Artificial sequence
  Synthetic oligonucleotide
gatcacacaaccat

SEQ ID NO: 330 - DNA, 14 bp, Artificial sequence
  Synthetic oligonucleotide
agatcacacaacca

SEQ ID NO: 331 - DNA, 14 bp, Artificial sequence
  Synthetic oligonucleotide
aagatcacacaacc

SEQ ID NO: 332 - DNA, 14 bp, Artificial sequence
  Synthetic oligonucleotide
aaagatcacacaac

SEQ ID NO: 333 - DNA, 14 bp, Artificial sequence
  Synthetic oligonucleotide
aaaagatcacacaa

SEQ ID NO: 334 - DNA, 14 bp, Artificial sequence
  Synthetic oligonucleotide
taaaagatcacaca

SEQ ID NO: 335 - DNA, 14 bp, Artificial sequence
  Synthetic oligonucleotide
ttcatttctaaaaa

SEQ ID NO: 336 - DNA, 14 bp, Artificial sequence
  Synthetic oligonucleotide
tttcatttctaaaa

SEQ ID NO: 337 - DNA, 14 bp, Artificial sequence
  Synthetic oligonucleotide
ctttcatttctaaa

SEQ ID NO: 338 - DNA, 14 bp, Artificial sequence
  Synthetic oligonucleotide
tctttcatttctaa

SEQ ID NO: 339 - DNA, 14 bp, Artificial sequence
  Synthetic oligonucleotide
atctttcatttcta

SEQ ID NO: 340 - DNA, 14 bp, Artificial sequence
  Synthetic oligonucleotide
gatctttcatttct

SEQ ID NO: 341 - DNA, 14 bp, Artificial sequence
  Synthetic oligonucleotide
tgatctttcatttc

SEQ ID NO: 342 - DNA, 14 bp, Artificial sequence
  Synthetic oligonucleotide
atgatctttcattt

SEQ ID NO: 343 - DNA, 14 bp, Artificial sequence
  Synthetic oligonucleotide
ataaaaacccactt

SEQ ID NO: 344 - DNA, 14 bp, Artificial sequence
  Synthetic oligonucleotide
cataaaaacccact

SEQ ID NO: 345 - DNA, 14 bp, Artificial sequence
  Synthetic oligonucleotide
acataaaaacccac

SEQ ID NO: 346 - DNA, 14 bp, Artificial sequence
  Synthetic oligonucleotide
cacataaaaaccca

SEQ ID NO: 347 - DNA, 14 bp, Artificial sequence
  Synthetic oligonucleotide
tcacataaaaaccc

SEQ ID NO: 348 - DNA, 14 bp, Artificial sequence
  Synthetic oligonucleotide
atcacataaaaacc

SEQ ID NO: 349 - DNA, 14 bp, Artificial sequence
  Synthetic oligonucleotide
catcacataaaaac

SEQ ID NO: 350 - DNA, 14 bp, Artificial sequence
  Synthetic oligonucleotide
tcatcacataaaaa

SEQ ID NO: 351 - DNA, 14 bp, Artificial sequence
  Synthetic oligonucleotide
gtcatcacataaaa

SEQ ID NO: 352 - DNA, 14 bp, Artificial sequence
  Synthetic oligonucleotide
agtcatcacataaa

SEQ ID NO: 353 - DNA, 14 bp, Artificial sequence
  Synthetic oligonucleotide
tagtcatcacataa

SEQ ID NO: 354 - DNA, 14 bp, Artificial sequence
  Synthetic oligonucleotide
atagtcatcacata

SEQ ID NO: 355 - DNA, 14 bp, Artificial sequence
  Synthetic oligonucleotide
catagtcatcacat

SEQ ID NO: 356 - DNA, 14 bp, Artificial sequence
  Synthetic oligonucleotide
taaatacaaatcta

SEQ ID NO: 357 - DNA, 14 bp, Artificial sequence
  Synthetic oligonucleotide
ctaaatacaaatct

SEQ ID NO: 358 - DNA, 14 bp, Artificial sequence
  Synthetic oligonucleotide
gctaaatacaaatc

SEQ ID NO: 359 - DNA, 14 bp, Artificial sequence
  Synthetic oligonucleotide
tgctaaatacaaat

SEQ ID NO: 360 - DNA, 14 bp, Artificial sequence
  Synthetic oligonucleotide
atgctaaatacaaa

SEQ ID NO: 361 - DNA, 14 bp, Artificial sequence
  Synthetic oligonucleotide
tatgctaaatacaa

SEQ ID NO: 362 - DNA, 14 bp, Artificial sequence
  Synthetic oligonucleotide
aatcttacactaaa

SEQ ID NO: 363 - DNA, 14 bp, Artificial sequence
  Synthetic oligonucleotide
taatcttacactaa

SEQ ID NO: 364 - DNA, 14 bp, Artificial sequence
  Synthetic oligonucleotide
ataatcttacacta

SEQ ID NO: 365 - DNA, 14 bp, Artificial sequence
  Synthetic oligonucleotide
aataatcttacact

SEQ ID NO: 366 - DNA, 14 bp, Artificial sequence
  Synthetic oligonucleotide
gaataatcttacac

SEQ ID NO: 367 - DNA, 14 bp, Artificial sequence
  Synthetic oligonucleotide
tgaataatcttaca

SEQ ID NO: 368 - DNA, 14 bp, Artificial sequence
  Synthetic oligonucleotide
atgaataatcttac

SEQ ID NO: 369 - DNA, 14 bp, Artificial sequence
  Synthetic oligonucleotide
caaaattctaataa

SEQ ID NO: 370 - DNA, 14 bp, Artificial sequence
  Synthetic oligonucleotide
tcaaaattctaata

SEQ ID NO: 371 - DNA, 14 bp, Artificial sequence
  Synthetic oligonucleotide
ttcaaaattctaat

SEQ ID NO: 372 - DNA, 14 bp, Artificial sequence
  Synthetic oligonucleotide
attcaaaattctaa

SEQ ID NO: 373 - DNA, 14 bp, Artificial sequence
  Synthetic oligonucleotide
gattcaaaattcta

SEQ ID NO: 374 - DNA, 14 bp, Artificial sequence
  Synthetic oligonucleotide
agattcaaaattct

SEQ ID NO: 375 - DNA, 14 bp, Artificial sequence
  Synthetic oligonucleotide
attactacaaccaa

SEQ ID NO: 376 - DNA, 14 bp, Artificial sequence
  Synthetic oligonucleotide
cattactacaacca

SEQ ID NO: 377 - DNA, 14 bp, Artificial sequence
  Synthetic oligonucleotide
ccattactacaacc

SEQ ID NO: 378 - DNA, 14 bp, Artificial sequence
  Synthetic oligonucleotide
accattactacaac

SEQ ID NO: 379 - DNA, 14 bp, Artificial sequence
  Synthetic oligonucleotide
aaccattactacaa

SEQ ID NO: 380 - DNA, 14 bp, Artificial sequence
  Synthetic oligonucleotide
aaaccattactaca

SEQ ID NO: 381 - DNA, 14 bp, Artificial sequence
  Synthetic oligonucleotide
gaaaccattactac

SEQ ID NO: 382 - DNA, 14 bp, Artificial sequence
  Synthetic oligonucleotide
tgaaaccattacta

SEQ ID NO: 383 - DNA, 14 bp, Artificial sequence
  Synthetic oligonucleotide
atgaaaccattact

SEQ ID NO: 384 - DNA, 14 bp, Artificial sequence
  Synthetic oligonucleotide
atttttaaaaacac

SEQ ID NO: 385 - DNA, 14 bp, Artificial sequence
  Synthetic oligonucleotide
aatttttaaaaaca

SEQ ID NO: 386 - DNA, 14 bp, Artificial sequence
  Synthetic oligonucleotide
taatttttaaaaac

SEQ ID NO: 387 - DNA, 14 bp, Artificial sequence
  Synthetic oligonucleotide
ataatttttaaaaa

SEQ ID NO: 388 - DNA, 14 bp, Artificial sequence
  Synthetic oligonucleotide
cataatttttaaaa

SEQ ID NO: 389 - DNA, 14 bp, Artificial sequence
  Synthetic oligonucleotide
tcataatttttaaa

SEQ ID NO: 390 - DNA, 14 bp, Artificial sequence
  Synthetic oligonucleotide
atcataatttttaa

SEQ ID NO: 391 - DNA, 14 bp, Artificial sequence
  Synthetic oligonucleotide
ctttatacaaaaaa

SEQ ID NO: 392 - DNA, 14 bp, Artificial sequence
  Synthetic oligonucleotide
actttatacaaaaa

SEQ ID NO: 393 - DNA, 14 bp, Artificial sequence
  Synthetic oligonucleotide
tactttatacaaaa

SEQ ID NO: 394 - DNA, 14 bp, Artificial sequence
  Synthetic oligonucleotide
ttactttatacaaa

SEQ ID NO: 395 - DNA, 14 bp, Artificial sequence
  Synthetic oligonucleotide
cttactttatacaa

SEQ ID NO: 396 - DNA, 14 bp, Artificial sequence
  Synthetic oligonucleotide
gcttactttataca

SEQ ID NO: 397 - DNA, 14 bp, Artificial sequence
  Synthetic oligonucleotide
tgcttactttatac

SEQ ID NO: 398 - DNA, 14 bp, Artificial sequence
  Synthetic oligonucleotide
tctcaaaataataa

SEQ ID NO: 399 - DNA, 14 bp, Artificial sequence
  Synthetic oligonucleotide
ctctcaaaataata

SEQ ID NO: 400 - DNA, 14 bp, Artificial sequence
  Synthetic oligonucleotide
tctctcaaaataat

SEQ ID NO: 401 - DNA, 14 bp, Artificial sequence
  Synthetic oligonucleotide
atctctcaaaataa

SEQ ID NO: 402 - DNA, 14 bp, Artificial sequence
  Synthetic oligonucleotide
aatctctcaaaata

SEQ ID NO: 403 - DNA, 14 bp, Artificial sequence
  Synthetic oligonucleotide
aaatctctcaaaat

SEQ ID NO: 404 - DNA, 14 bp, Artificial sequence
  Synthetic oligonucleotide
taaatctctcaaaa

SEQ ID NO: 405 - DNA, 14 bp, Artificial sequence
  Synthetic oligonucleotide
ttaaatctctcaaa

SEQ ID NO: 406 - DNA, 14 bp, Artificial sequence
  Synthetic oligonucleotide
tttaaatctctcaa

SEQ ID NO: 407 - DNA, 14 bp, Artificial sequence
  Synthetic oligonucleotide
ttttaaatctctca

SEQ ID NO: 408 - DNA, 14 bp, Artificial sequence
  Synthetic oligonucleotide
taatactttttcca

SEQ ID NO: 409 - DNA, 14 bp, Artificial sequence
  Synthetic oligonucleotide
ttaatactttttcc

SEQ ID NO: 410 - DNA, 14 bp, Artificial sequence
  Synthetic oligonucleotide
gttaatactttttc

SEQ ID NO: 411 - DNA, 14 bp, Artificial sequence
  Synthetic oligonucleotide
tgttaatacttttt

SEQ ID NO: 412 - DNA, 14 bp, Artificial sequence
  Synthetic oligonucleotide
atgttaatactttt

SEQ ID NO: 413 - DNA, 14 bp, Artificial sequence
  Synthetic oligonucleotide
ttatcactaccaca

SEQ ID NO: 414 - DNA, 14 bp, Artificial sequence
  Synthetic oligonucleotide
tttatcactaccac

SEQ ID NO: 415 - DNA, 14 bp, Artificial sequence
  Synthetic oligonucleotide
atttatcactacca

SEQ ID NO: 416 - DNA, 14 bp, Artificial sequence
  Synthetic oligonucleotide
catttatcactacc

SEQ ID NO: 417 - DNA, 14 bp, Artificial sequence
  Synthetic oligonucleotide
tcatttatcactac

SEQ ID NO: 418 - DNA, 14 bp, Artificial sequence
  Synthetic oligonucleotide
atcatttatcacta

SEQ ID NO: 419 - DNA, 14 bp, Artificial sequence
  Synthetic oligonucleotide
catcatttatcact

SEQ ID NO: 420 - DNA, 14 bp, Artificial sequence
  Synthetic oligonucleotide
acatcatttatcac

SEQ ID NO: 421 - DNA, 14 bp, Artificial sequence
  Synthetic oligonucleotide
aacatcatttatca

SEQ ID NO: 422 - DNA, 14 bp, Artificial sequence
  Synthetic oligonucleotide
taacatcatttatc

SEQ ID NO: 423 - DNA, 14 bp, Artificial sequence
  Synthetic oligonucleotide
ttaacatcatttat

SEQ ID NO: 424 - DNA, 14 bp, Artificial sequence
  Synthetic oligonucleotide
attaacatcattta

SEQ ID NO: 425 - DNA, 14 bp, Artificial sequence
  Synthetic oligonucleotide
aattaacatcattt

SEQ ID NO: 426 - DNA, 14 bp, Artificial sequence
  Synthetic oligonucleotide
taattaacatcatt

SEQ ID NO: 427 - DNA, 14 bp, Artificial sequence
  Synthetic oligonucleotide
ctaattaacatcat

SEQ ID NO: 428 - DNA, 14 bp, Artificial sequence
  Synthetic oligonucleotide
cctaattaacatca

SEQ ID NO: 429 - DNA, 14 bp, Artificial sequence
  Synthetic oligonucleotide
ccctaattaacatc

SEQ ID NO: 430 - DNA, 14 bp, Artificial sequence
  Synthetic oligonucleotide
gccctaattaacat

SEQ ID NO: 431 - DNA, 14 bp, Artificial sequence
  Synthetic oligonucleotide
ggccctaattaaca

SEQ ID NO: 432 - DNA, 14 bp, Artificial sequence
  Synthetic oligonucleotide
cggccctaattaac

SEQ ID NO: 433 - DNA, 14 bp, Artificial sequence
  Synthetic oligonucleotide
aaacacattttttt

SEQ ID NO: 434 - DNA, 14 bp, Artificial sequence
  Synthetic oligonucleotide
taaacacatttttt

SEQ ID NO: 435 - DNA, 14 bp, Artificial sequence
  Synthetic oligonucleotide
ataaacacattttt

SEQ ID NO: 436 - DNA, 14 bp, Artificial sequence
  Synthetic oligonucleotide
tataaacacatttt

SEQ ID NO: 437 - DNA, 14 bp, Artificial sequence
  Synthetic oligonucleotide
atataaacacattt

SEQ ID NO: 438 - DNA, 14 bp, Artificial sequence
  Synthetic oligonucleotide
catataaacacatt

SEQ ID NO: 439 - DNA, 14 bp, Artificial sequence
  Synthetic oligonucleotide
acatataaacacat

SEQ ID NO: 440 - DNA, 14 bp, Artificial sequence
  Synthetic oligonucleotide
aacatataaacaca

SEQ ID NO: 441 - DNA, 14 bp, Artificial sequence
  Synthetic oligonucleotide
taacatataaacac

SEQ ID NO: 442 - DNA, 14 bp, Artificial sequence
  Synthetic oligonucleotide
ataacatataaaca

SEQ ID NO: 443 - DNA, 14 bp, Artificial sequence
  Synthetic oligonucleotide
tataacatataaac

SEQ ID NO: 444 - DNA, 14 bp, Artificial sequence
  Synthetic oligonucleotide
atataacatataaa

SEQ ID NO: 445 - DNA, 14 bp, Artificial sequence
  Synthetic oligonucleotide
catataacatataa

SEQ ID NO: 446 - DNA, 14 bp, Artificial sequence
  Synthetic oligonucleotide
acatataacatata

SEQ ID NO: 447 - DNA, 14 bp, Artificial sequence
  Synthetic oligonucleotide
cacatataacatat

SEQ ID NO: 448 - DNA, 14 bp, Artificial sequence
  Synthetic oligonucleotide
tcacatataacata

SEQ ID NO: 449 - DNA, 14 bp, Artificial sequence
  Synthetic oligonucleotide
atcacatataacat

SEQ ID NO: 450 - DNA, 14 bp, Artificial sequence
  Synthetic oligonucleotide
tatcacatataaca

SEQ ID NO: 451 - DNA, 14 bp, Artificial sequence
  Synthetic oligonucleotide
ctatcacatataac

SEQ ID NO: 452 - DNA, 14 bp, Artificial sequence
  Synthetic oligonucleotide
actatcacatataa

SEQ ID NO: 453 - DNA, 14 bp, Artificial sequence
  Synthetic oligonucleotide
cactatcacatata

SEQ ID NO: 454 - DNA, 14 bp, Artificial sequence
  Synthetic oligonucleotide
gtccaacataactc

SEQ ID NO: 455 - DNA, 14 bp, Artificial sequence
  Synthetic oligonucleotide
agtccaacataact

SEQ ID NO: 456 - DNA, 14 bp, Artificial sequence
  Synthetic oligonucleotide
cagtccaacataac

SEQ ID NO: 457 - DNA, 14 bp, Artificial sequence
  Synthetic oligonucleotide
tcagtccaacataa

SEQ ID NO: 458 - DNA, 14 bp, Artificial sequence
  Synthetic oligonucleotide
atcagtccaacata

SEQ ID NO: 459 - DNA, 14 bp, Artificial sequence
  Synthetic oligonucleotide
tatcagtccaacat

SEQ ID NO: 460 - DNA, 14 bp, Artificial sequence
  Synthetic oligonucleotide
aaaccctcccaaaa

SEQ ID NO: 461 - DNA, 14 bp, Artificial sequence
  Synthetic oligonucleotide
taaaccctcccaaa

SEQ ID NO: 462 - DNA, 14 bp, Artificial sequence
  Synthetic oligonucleotide
ttaaaccctcccaa

SEQ ID NO: 463 - DNA, 14 bp, Artificial sequence
  Synthetic oligonucleotide
attaaaccctccca

SEQ ID NO: 464 - DNA, 14 bp, Artificial sequence
  Synthetic oligonucleotide
cattaaaccctccc

SEQ ID NO: 465 - DNA, 14 bp, Artificial sequence
  Synthetic oligonucleotide
acattaaaccctcc

SEQ ID NO: 466 - DNA, 14 bp, Artificial sequence
  Synthetic oligonucleotide
aacattaaaccctc

SEQ ID NO: 467 - DNA, 14 bp, Artificial sequence
  Synthetic oligonucleotide
aaacattaaaccct

SEQ ID NO: 468 - DNA, 14 bp, Artificial sequence
  Synthetic oligonucleotide
taaacattaaaccc

SEQ ID NO: 469 - DNA, 14 bp, Artificial sequence
  Synthetic oligonucleotide
ataaacattaaacc

SEQ ID NO: 470 - DNA, 14 bp, Artificial sequence
  Synthetic oligonucleotide
tataaacattaaac

SEQ ID NO: 471 - DNA, 14 bp, Artificial sequence
  Synthetic oligonucleotide
ctataaacattaaa

SEQ ID NO: 472 - DNA, 14 bp, Artificial sequence
  Synthetic oligonucleotide
actataaacattaa

SEQ ID NO: 473 - DNA, 14 bp, Artificial sequence
  Synthetic oligonucleotide
aactataaacatta

SEQ ID NO: 474 - DNA, 14 bp, Artificial sequence
  Synthetic oligonucleotide
aaactataaacatt

SEQ ID NO: 475 - DNA, 14 bp, Artificial sequence
  Synthetic oligonucleotide
taaactataaacat

SEQ ID NO: 476 - DNA, 14 bp, Artificial sequence
  Synthetic oligonucleotide
ttaaactataaaca

SEQ ID NO: 477 - DNA, 14 bp, Artificial sequence
  Synthetic oligonucleotide
tttaaactataaac

SEQ ID NO: 478 - DNA, 14 bp, Artificial sequence
  Synthetic oligonucleotide
ctttaaactataaa

SEQ ID NO: 479 - DNA, 14 bp, Artificial sequence
  Synthetic oligonucleotide
gctttaaactataa

SEQ ID NO: 480 - DNA, 14 bp, Artificial sequence
  Synthetic oligonucleotide
tgctttaaactata

SEQ ID NO: 481 - DNA, 14 bp, Artificial sequence
  Synthetic oligonucleotide
cagcctatcaccac

SEQ ID NO: 482 - DNA, 14 bp, Artificial sequence
  Synthetic oligonucleotide
acagcctatcacca

SEQ ID NO: 483 - DNA, 14 bp, Artificial sequence
  Synthetic oligonucleotide
cacagcctatcacc

SEQ ID NO: 484 - DNA, 14 bp, Artificial sequence
  Synthetic oligonucleotide
tcacagcctatcac

SEQ ID NO: 485 - DNA, 14 bp, Artificial sequence
  Synthetic oligonucleotide
atcacagcctatca

SEQ ID NO: 486 - DNA, 14 bp, Artificial sequence
  Synthetic oligonucleotide
aatcacagcctatc

SEQ ID NO: 487 - DNA, 14 bp, Artificial sequence
  Synthetic oligonucleotide
aaatcacagcctat

SEQ ID NO: 488 - DNA, 14 bp, Artificial sequence
  Synthetic oligonucleotide
caaatcacagccta

SEQ ID NO: 489 - DNA, 14 bp, Artificial sequence
  Synthetic oligonucleotide
ccaaatcacagcct

SEQ ID NO: 490 - DNA, 14 bp, Artificial sequence
  Synthetic oligonucleotide
cccaaatcacagcc

SEQ ID NO: 491 - DNA, 14 bp, Artificial sequence
  Synthetic oligonucleotide
acccaaatcacagc

SEQ ID NO: 492 - DNA, 14 bp, Artificial sequence
  Synthetic oligonucleotide
cacccaaatcacag

SEQ ID NO: 493 - DNA, 14 bp, Artificial sequence
  Synthetic oligonucleotide
tcacccaaatcaca

SEQ ID NO: 494 - DNA, 14 bp, Artificial sequence
  Synthetic oligonucleotide
gtcacccaaatcac

SEQ ID NO: 495 - DNA, 14 bp, Artificial sequence
  Synthetic oligonucleotide
cgtcacccaaatca

SEQ ID NO: 496 - DNA, 14 bp, Artificial sequence
  Synthetic oligonucleotide
gcgtcacccaaatc

SEQ ID NO: 497 - DNA, 14 bp, Artificial sequence
  Synthetic oligonucleotide
agcgtcacccaaat

SEQ ID NO: 498 - DNA, 14 bp, Artificial sequence
  Synthetic oligonucleotide
atcctaaaatcact

SEQ ID NO: 499 - DNA, 14 bp, Artificial sequence
  Synthetic oligonucleotide
gatcctaaaatcac

SEQ ID NO: 500 - DNA, 14 bp, Artificial sequence
  Synthetic oligonucleotide
agatcctaaaatca

SEQ ID NO: 501 - DNA, 14 bp, Artificial sequence
  Synthetic oligonucleotide
cagatcctaaaatc

SEQ ID NO: 502 - DNA, 14 bp, Artificial sequence
  Synthetic oligonucleotide
tcagatcctaaaat

SEQ ID NO: 503 - DNA, 14 bp, Artificial sequence
  Synthetic oligonucleotide
aaaccaatcatcat

SEQ ID NO: 504 - DNA, 14 bp, Artificial sequence
  Synthetic oligonucleotide
aaaaccaatcatca

SEQ ID NO: 505 - DNA, 14 bp, Artificial sequence
  Synthetic oligonucleotide
taaaaccaatcatc

SEQ ID NO: 506 - DNA, 14 bp, Artificial sequence
  Synthetic oligonucleotide
gtaaaaccaatcat

SEQ ID NO: 507 - DNA, 14 bp, Artificial sequence
  Synthetic oligonucleotide
agtaaaaccaatca

SEQ ID NO: 508 - DNA, 14 bp, Artificial sequence
  Synthetic oligonucleotide
aagtaaaaccaatc

SEQ ID NO: 509 - DNA, 14 bp, Artificial sequence
  Synthetic oligonucleotide
aaagtaaaaccaat

SEQ ID NO: 510 - DNA, 14 bp, Artificial sequence
  Synthetic oligonucleotide
catctctactaaaa

SEQ ID NO: 511 - DNA, 14 bp, Artificial sequence
  Synthetic oligonucleotide
ccatctctactaaa

SEQ ID NO: 512 - DNA, 14 bp, Artificial sequence
  Synthetic oligonucleotide
tccatctctactaa

SEQ ID NO: 513 - DNA, 14 bp, Artificial sequence
  Synthetic oligonucleotide
ttccatctctacta

SEQ ID NO: 514 - DNA, 14 bp, Artificial sequence
  Synthetic oligonucleotide
cttccatctctact

SEQ ID NO: 515 - DNA, 14 bp, Artificial sequence
  Synthetic oligonucleotide
ccttccatctctac

SEQ ID NO: 516 - DNA, 14 bp, Artificial sequence
  Synthetic oligonucleotide
cccttccatctcta

SEQ ID NO: 517 - DNA, 14 bp, Artificial sequence
  Synthetic oligonucleotide
acataacaaaccca

SEQ ID NO: 518 - DNA, 14 bp, Artificial sequence
  Synthetic oligonucleotide
tacataacaaaccc

SEQ ID NO: 519 - DNA, 14 bp, Artificial sequence
  Synthetic oligonucleotide
ctacataacaaacc

SEQ ID NO: 520 - DNA, 14 bp, Artificial sequence
  Synthetic oligonucleotide
actacataacaaac

SEQ ID NO: 521 - DNA, 14 bp, Artificial sequence
  Synthetic oligonucleotide
aactacataacaaa

SEQ ID NO: 522 - DNA, 14 bp, Artificial sequence
  Synthetic oligonucleotide
taactacataacaa

SEQ ID NO: 523 - DNA, 14 bp, Artificial sequence
  Synthetic oligonucleotide
ataactacataaca

SEQ ID NO: 524 - DNA, 14 bp, Artificial sequence
  Synthetic oligonucleotide
aataactacataac

SEQ ID NO: 525 - DNA, 14 bp, Artificial sequence
  Synthetic oligonucleotide
caataactacataa

SEQ ID NO: 526 - DNA, 14 bp, Artificial sequence
  Synthetic oligonucleotide
acaataactacata

SEQ ID NO: 527 - DNA, 14 bp, Artificial sequence
  Synthetic oligonucleotide
cacaataactacat

SEQ ID NO: 528 - DNA, 14 bp, Artificial sequence
  Synthetic oligonucleotide
tcacaataactaca

SEQ ID NO: 529 - DNA, 14 bp, Artificial sequence
  Synthetic oligonucleotide
ttcacaataactac

SEQ ID NO: 530 - DNA, 14 bp, Artificial sequence
  Synthetic oligonucleotide
attcacaataacta

SEQ ID NO: 531 - DNA, 14 bp, Artificial sequence
  Synthetic oligonucleotide
aattcacaataact

SEQ ID NO: 532 - DNA, 14 bp, Artificial sequence
  Synthetic oligonucleotide
gaattcacaataac

SEQ ID NO: 533 - DNA, 14 bp, Artificial sequence
  Synthetic oligonucleotide
tgaattcacaataa

SEQ ID NO: 534 - DNA, 14 bp, Artificial sequence
  Synthetic oligonucleotide
ctaaaacaatctaa

SEQ ID NO: 535 - DNA, 14 bp, Artificial sequence
  Synthetic oligonucleotide
cctaaaacaatcta

SEQ ID NO: 536 - DNA, 14 bp, Artificial sequence
  Synthetic oligonucleotide
acctaaaacaatct

SEQ ID NO: 537 - DNA, 14 bp, Artificial sequence
  Synthetic oligonucleotide
tacctaaaacaatc

SEQ ID NO: 538 - DNA, 14 bp, Artificial sequence
  Synthetic oligonucleotide
atacctaaaacaat

SEQ ID NO: 539 - DNA, 14 bp, Artificial sequence
  Synthetic oligonucleotide
tatacctaaaacaa

SEQ ID NO: 540 - DNA, 14 bp, Artificial sequence
  Synthetic oligonucleotide
ctatacctaaaaca

SEQ ID NO: 541 - DNA, 14 bp, Artificial sequence
  Synthetic oligonucleotide
gctatacctaaaac

SEQ ID NO: 542 - DNA, 14 bp, Artificial sequence
  Synthetic oligonucleotide
ttgtaactaaaaat

SEQ ID NO: 543 - DNA, 14 bp, Artificial sequence
  Synthetic oligonucleotide
cttgtaactaaaaa

SEQ ID NO: 544 - DNA, 14 bp, Artificial sequence
  Synthetic oligonucleotide
ccttgtaactaaaa

SEQ ID NO: 545 - DNA, 14 bp, Artificial sequence
  Synthetic oligonucleotide
cccttgtaactaaa

SEQ ID NO: 546 - DNA, 14 bp, Artificial sequence
  Synthetic oligonucleotide
ccccttgtaactaa

SEQ ID NO: 547 - DNA, 14 bp, Artificial sequence
  Synthetic oligonucleotide
accccttgtaacta

SEQ ID NO: 548 - DNA, 14 bp, Artificial sequence
  Synthetic oligonucleotide
caccccttgtaact

SEQ ID NO: 549 - DNA, 14 bp, Artificial sequence
  Synthetic oligonucleotide
acaccccttgtaac

SEQ ID NO: 550 - DNA, 14 bp, Artificial sequence
  Synthetic oligonucleotide
ttcatatatacatc

SEQ ID NO: 551 - DNA, 14 bp, Artificial sequence
  Synthetic oligonucleotide
cttcatatatacat

SEQ ID NO: 552 - DNA, 14 bp, Artificial sequence
  Synthetic oligonucleotide
ccttcatatataca

SEQ ID NO: 553 - DNA, 14 bp, Artificial sequence
  Synthetic oligonucleotide
cccttcatatatac

SEQ ID NO: 554 - DNA, 14 bp, Artificial sequence
  Synthetic oligonucleotide
acccttcatatata

SEQ ID NO: 555 - DNA, 14 bp, Artificial sequence
  Synthetic oligonucleotide
tacccttcatatat

SEQ ID NO: 556 - DNA, 14 bp, Artificial sequence
  Synthetic oligonucleotide
ttacccttcatata

SEQ ID NO: 557 - DNA, 14 bp, Artificial sequence
  Synthetic oligonucleotide
attacccttcatat

SEQ ID NO: 558 - DNA, 14 bp, Artificial sequence
  Synthetic oligonucleotide
cattacccttcata

SEQ ID NO: 559 - DNA, 14 bp, Artificial sequence
  Synthetic oligonucleotide
acattacccttcat

SEQ ID NO: 560 - DNA, 14 bp, Artificial sequence
  Synthetic oligonucleotide
tacattacccttca

SEQ ID NO: 561 - DNA, 14 bp, Artificial sequence
  Synthetic oligonucleotide
tcttatacttacta

SEQ ID NO: 562 - DNA, 14 bp, Artificial sequence
  Synthetic oligonucleotide
ttcttatacttact

SEQ ID NO: 563 - DNA, 14 bp, Artificial sequence
  Synthetic oligonucleotide
attcttatacttac

SEQ ID NO: 564 - DNA, 14 bp, Artificial sequence
  Synthetic oligonucleotide
gattcttatactta

SEQ ID NO: 565 - DNA, 14 bp, Artificial sequence
  Synthetic oligonucleotide
tgattcttatactt

SEQ ID NO: 566 - DNA, 14 bp, Artificial sequence
  Synthetic oligonucleotide
atgattcttatact

SEQ ID NO: 567 - DNA, 14 bp, Artificial sequence
  Synthetic oligonucleotide
aacttcactaaaat

SEQ ID NO: 568 - DNA, 14 bp, Artificial sequence
  Synthetic oligonucleotide
aaacttcactaaaa

SEQ ID NO: 569 - DNA, 14 bp, Artificial sequence
  Synthetic oligonucleotide
taaacttcactaaa

SEQ ID NO: 570 - DNA, 14 bp, Artificial sequence
  Synthetic oligonucleotide
ataaacttcactaa

SEQ ID NO: 571 - DNA, 14 bp, Artificial sequence
  Synthetic oligonucleotide
aataaacttcacta

SEQ ID NO: 572 - DNA, 14 bp, Artificial sequence
  Synthetic oligonucleotide
taataaacttcact

SEQ ID NO: 573 - DNA, 14 bp, Artificial sequence
  Synthetic oligonucleotide
ctaataaacttcac

SEQ ID NO: 574 - DNA, 14 bp, Artificial sequence
  Synthetic oligonucleotide
actaataaacttca

SEQ ID NO: 575 - DNA, 14 bp, Artificial sequence
  Synthetic oligonucleotide
aactaataaacttc

SEQ ID NO: 576 - DNA, 14 bp, Artificial sequence
  Synthetic oligonucleotide
aatcttctatttta

SEQ ID NO: 577 - DNA, 14 bp, Artificial sequence
  Synthetic oligonucleotide
caatcttctatttt

SEQ ID NO: 578 - DNA, 14 bp, Artificial sequence
  Synthetic oligonucleotide
ccaatcttctattt

SEQ ID NO: 579 - DNA, 14 bp, Artificial sequence
  Synthetic oligonucleotide
accaatcttctatt

SEQ ID NO: 580 - DNA, 14 bp, Artificial sequence
  Synthetic oligonucleotide
aaccaatcttctat

SEQ ID NO: 581 - DNA, 14 bp, Artificial sequence
  Synthetic oligonucleotide
caaccaatcttcta

SEQ ID NO: 582 - DNA, 14 bp, Artificial sequence
  Synthetic oligonucleotide
gcaaccaatcttct

SEQ ID NO: 583 - DNA, 14 bp, Artificial sequence
  Synthetic oligonucleotide
tgcaaccaatcttc

SEQ ID NO: 584 - DNA, 14 bp, Artificial sequence
  Synthetic oligonucleotide
ctgcaaccaatctt

SEQ ID NO: 585 - DNA, 14 bp, Artificial sequence
  Synthetic oligonucleotide
actgcaaccaatct

SEQ ID NO: 586 - DNA, 14 bp, Artificial sequence
  Synthetic oligonucleotide
aactgcaaccaatc

SEQ ID NO: 587 - DNA, 14 bp, Artificial sequence
  Synthetic oligonucleotide
taactgcaaccaat

SEQ ID NO: 588 - DNA, 14 bp, Artificial sequence
  Synthetic oligonucleotide
tacaacacacatca

SEQ ID NO: 589 - DNA, 14 bp, Artificial sequence
  Synthetic oligonucleotide
atacaacacacatc

SEQ ID NO: 590 - DNA, 14 bp, Artificial sequence
  Synthetic oligonucleotide
aatacaacacacat

SEQ ID NO: 591 - DNA, 14 bp, Artificial sequence
  Synthetic oligonucleotide
gaatacaacacaca

SEQ ID NO: 592 - DNA, 14 bp, Artificial sequence
  Synthetic oligonucleotide
tgaatacaacacac

SEQ ID NO: 593 - DNA, 14 bp, Artificial sequence
  Synthetic oligonucleotide
atgaatacaacaca

SEQ ID NO: 594 - DNA, 14 bp, Artificial sequence
  Synthetic oligonucleotide
cctaataaaatata

SEQ ID NO: 595 - DNA, 14 bp, Artificial sequence
  Synthetic oligonucleotide
tcctaataaaatat

SEQ ID NO: 596 - DNA, 14 bp, Artificial sequence
  Synthetic oligonucleotide
ctcctaataaaata

SEQ ID NO: 597 - DNA, 14 bp, Artificial sequence
  Synthetic oligonucleotide
actcctaataaaat

SEQ ID NO: 598 - DNA, 14 bp, Artificial sequence
  Synthetic oligonucleotide
tactcctaataaaa

SEQ ID NO: 599 - DNA, 14 bp, Artificial sequence
  Synthetic oligonucleotide
ctactcctaataaa

SEQ ID NO: 600 - DNA, 14 bp, Artificial sequence
  Synthetic oligonucleotide
actactcctaataa

SEQ ID NO: 601 - DNA, 14 bp, Artificial sequence
  Synthetic oligonucleotide
aactactcctaata

SEQ ID NO: 602 - DNA, 14 bp, Artificial sequence
  Synthetic oligonucleotide
taactactcctaat

SEQ ID NO: 603 - DNA, 14 bp, Artificial sequence
  Synthetic oligonucleotide
ataactactcctaa

SEQ ID NO: 604 - DNA, 14 bp, Artificial sequence
  Synthetic oligonucleotide
tataactactccta

SEQ ID NO: 605 - DNA, 14 bp, Artificial sequence
  Synthetic oligonucleotide
atataactactcct

SEQ ID NO: 606 - DNA, 14 bp, Artificial sequence
  Synthetic oligonucleotide
aatataactactcc

SEQ ID NO: 607 - DNA, 14 bp, Artificial sequence
  Synthetic oligonucleotide
aaatataactactc

SEQ ID NO: 608 - DNA, 14 bp, Artificial sequence
  Synthetic oligonucleotide
aaaatataactact

SEQ ID NO: 609 - DNA, 14 bp, Artificial sequence
  Synthetic oligonucleotide
aaaaatataactac

SEQ ID NO: 610 - DNA, 14 bp, Artificial sequence
  Synthetic oligonucleotide
taaaaatataacta

SEQ ID NO: 611 - DNA, 14 bp, Artificial sequence
  Synthetic oligonucleotide
gtaaaaatataact

SEQ ID NO: 612 - DNA, 14 bp, Artificial sequence
  Synthetic oligonucleotide
agtaaaaatataac

SEQ ID NO: 613 - DNA, 14 bp, Artificial sequence
  Synthetic oligonucleotide
actgatacccacaa

SEQ ID NO: 614 - DNA, 14 bp, Artificial sequence
  Synthetic oligonucleotide
aactgatacccaca

SEQ ID NO: 615 - DNA, 14 bp, Artificial sequence
  Synthetic oligonucleotide
caactgatacccac

SEQ ID NO: 616 - DNA, 14 bp, Artificial sequence
  Synthetic oligonucleotide
tcaactgataccca

SEQ ID NO: 617 - DNA, 14 bp, Artificial sequence
  Synthetic oligonucleotide
atcactaaaaaact

SEQ ID NO: 618 - DNA, 14 bp, Artificial sequence
  Synthetic oligonucleotide
tatcactaaaaaac

SEQ ID NO: 619 - DNA, 14 bp, Artificial sequence
  Synthetic oligonucleotide
atatcactaaaaaa

SEQ ID NO: 620 - DNA, 14 bp, Artificial sequence
  Synthetic oligonucleotide
tatatcactaaaaa

SEQ ID NO: 621 - DNA, 14 bp, Artificial sequence
  Synthetic oligonucleotide
ttatatcactaaaa

SEQ ID NO: 622 - DNA, 14 bp, Artificial sequence
  Synthetic oligonucleotide
tttatatcactaaa

SEQ ID NO: 623 - DNA, 14 bp, Artificial sequence
  Synthetic oligonucleotide
gtttatatcactaa

SEQ ID NO: 624 - DNA, 14 bp, Artificial sequence
  Synthetic oligonucleotide
aaacttttaattaa

SEQ ID NO: 625 - DNA, 14 bp, Artificial sequence
  Synthetic oligonucleotide
caaacttttaatta

SEQ ID NO: 626 - DNA, 14 bp, Artificial sequence
  Synthetic oligonucleotide
tcaaacttttaatt

SEQ ID NO: 627 - DNA, 14 bp, Artificial sequence
  Synthetic oligonucleotide
ttcaaacttttaat

SEQ ID NO: 628 - DNA, 14 bp, Artificial sequence
  Synthetic oligonucleotide
cttcaaacttttaa

SEQ ID NO: 629 - DNA, 14 bp, Artificial sequence
  Synthetic oligonucleotide
acttcaaactttta

SEQ ID NO: 630 - DNA, 14 bp, Artificial sequence
  Synthetic oligonucleotide
cacttcaaactttt

SEQ ID NO: 631 - DNA, 14 bp, Artificial sequence
  Synthetic oligonucleotide
ccacttcaaacttt

SEQ ID NO: 632 - DNA, 14 bp, Artificial sequence
  Synthetic oligonucleotide
cccacttcaaactt

SEQ ID NO: 633 - DNA, 14 bp, Artificial sequence
  Synthetic oligonucleotide
acccacttcaaact

SEQ ID NO: 634 - DNA, 14 bp, Artificial sequence
  Synthetic oligonucleotide
aacccacttcaaac

SEQ ID NO: 635 - DNA, 14 bp, Artificial sequence
  Synthetic oligonucleotide
aaacccacttcaaa

SEQ ID NO: 636 - DNA, 14 bp, Artificial sequence
  Synthetic oligonucleotide
aaaacccacttcaa

SEQ ID NO: 637 - DNA, 14 bp, Artificial sequence
  Synthetic oligonucleotide
aaaaacccacttca

SEQ ID NO: 638 - DNA, 14 bp, Artificial sequence
  Synthetic oligonucleotide
aaaaaacccacttc

SEQ ID NO: 639 - DNA, 14 bp, Artificial sequence
  Synthetic oligonucleotide
caaaaaacccactt

SEQ ID NO: 640 - DNA, 14 bp, Artificial sequence
  Synthetic oligonucleotide
acaaaaaacccact

SEQ ID NO: 641 - DNA, 14 bp, Artificial sequence
  Synthetic oligonucleotide
aacaaaaaacccac

SEQ ID NO: 642 - DNA, 14 bp, Artificial sequence
  Synthetic oligonucleotide
aaacaaaaaaccca

SEQ ID NO: 643 - DNA, 14 bp, Artificial sequence
  Synthetic oligonucleotide
aaaacaaaaaaccc

SEQ ID NO: 644 - DNA, 14 bp, Artificial sequence
  Synthetic oligonucleotide
atcttcccattaat

SEQ ID NO: 645 - DNA, 14 bp, Artificial sequence
  Synthetic oligonucleotide
aatcttcccattaa

SEQ ID NO: 646 - DNA, 14 bp, Artificial sequence
  Synthetic oligonucleotide
taatcttcccatta

SEQ ID NO: 647 - DNA, 14 bp, Artificial sequence
  Synthetic oligonucleotide
ataatcttcccatt

SEQ ID NO: 648 - DNA, 14 bp, Artificial sequence
  Synthetic oligonucleotide
aataatcttcccat

SEQ ID NO: 649 - DNA, 14 bp, Artificial sequence
  Synthetic oligonucleotide
aaataatcttccca

SEQ ID NO: 650 - DNA, 14 bp, Artificial sequence
  Synthetic oligonucleotide
aaaataatcttccc

SEQ ID NO: 651 - DNA, 14 bp, Artificial sequence
  Synthetic oligonucleotide
tattaatcaaaaat

SEQ ID NO: 652 - DNA, 14 bp, Artificial sequence
  Synthetic oligonucleotide
ctattaatcaaaaa

SEQ ID NO: 653 - DNA, 14 bp, Artificial sequence
  Synthetic oligonucleotide
tctattaatcaaaa

SEQ ID NO: 654 - DNA, 14 bp, Artificial sequence
  Synthetic oligonucleotide
ctctattaatcaaa

SEQ ID NO: 655 - DNA, 14 bp, Artificial sequence
  Synthetic oligonucleotide
actctattaatcaa

SEQ ID NO: 656 - DNA, 14 bp, Artificial sequence
  Synthetic oligonucleotide
gactctattaatca

SEQ ID NO: 657 - DNA, 14 bp, Artificial sequence
  Synthetic oligonucleotide
tattctactcttct

SEQ ID NO: 658 - DNA, 14 bp, Artificial sequence
  Synthetic oligonucleotide
atattctactcttc

SEQ ID NO: 659 - DNA, 14 bp, Artificial sequence
  Synthetic oligonucleotide
aatattctactctt

SEQ ID NO: 660 - DNA, 14 bp, Artificial sequence
  Synthetic oligonucleotide
gaatattctactct

SEQ ID NO: 661 - DNA, 14 bp, Artificial sequence
  Synthetic oligonucleotide
agaatattctactc

SEQ ID NO: 662 - DNA, 14 bp, Artificial sequence
  Synthetic oligonucleotide
atttaccaattcaa

SEQ ID NO: 663 - DNA, 14 bp, Artificial sequence
  Synthetic oligonucleotide
tatttaccaattca

SEQ ID NO: 664 - DNA, 14 bp, Artificial sequence
  Synthetic oligonucleotide
gtatttaccaattc

SEQ ID NO: 665 - DNA, 14 bp, Artificial sequence
  Synthetic oligonucleotide
tgtatttaccaatt

SEQ ID NO: 666 - DNA, 14 bp, Artificial sequence
  Synthetic oligonucleotide
ctgtatttaccaat

SEQ ID NO: 667 - DNA, 14 bp, Artificial sequence
  Synthetic oligonucleotide
actgtatttaccaa

SEQ ID NO: 668 - DNA, 14 bp, Artificial sequence
  Synthetic oligonucleotide
ttataccatcaaat

SEQ ID NO: 669 - DNA, 14 bp, Artificial sequence
  Synthetic oligonucleotide
attataccatcaaa

SEQ ID NO: 670 - DNA, 14 bp, Artificial sequence
  Synthetic oligonucleotide
cattataccatcaa

SEQ ID NO: 671 - DNA, 14 bp, Artificial sequence
  Synthetic oligonucleotide
tcattataccatca

SEQ ID NO: 672 - DNA, 14 bp, Artificial sequence
  Synthetic oligonucleotide
ttcattataccatc

SEQ ID NO: 673 - DNA, 14 bp, Artificial sequence
  Synthetic oligonucleotide
cttcattataccat

SEQ ID NO: 674 - DNA, 14 bp, Artificial sequence
  Synthetic oligonucleotide
tcttcattatacca

SEQ ID NO: 675 - DNA, 14 bp, Artificial sequence
  Synthetic oligonucleotide
ttcttcattatacc

SEQ ID NO: 676 - DNA, 14 bp, Artificial sequence
  Synthetic oligonucleotide
tttcttcattatac

SEQ ID NO: 677 - DNA, 14 bp, Artificial sequence
  Synthetic oligonucleotide
ttttcttcattata

SEQ ID NO: 678 - DNA, 14 bp, Artificial sequence
  Synthetic oligonucleotide
attttcttcattat

SEQ ID NO: 679 - DNA, 14 bp, Artificial sequence
  Synthetic oligonucleotide
tattttcttcatta

SEQ ID NO: 680 - DNA, 14 bp, Artificial sequence
  Synthetic oligonucleotide
atattttcttcatt

SEQ ID NO: 681 - DNA, 14 bp, Artificial sequence
  Synthetic oligonucleotide
aatattttcttcat

SEQ ID NO: 682 - DNA, 14 bp, Artificial sequence
  Synthetic oligonucleotide
aaatattttcttca

SEQ ID NO: 683 - DNA, 14 bp, Artificial sequence
  Synthetic oligonucleotide
taaatattttcttc

SEQ ID NO: 684 - DNA, 14 bp, Artificial sequence
  Synthetic oligonucleotide
aataatccaaactt

SEQ ID NO: 685 - DNA, 14 bp, Artificial sequence
  Synthetic oligonucleotide
aaataatccaaact

SEQ ID NO: 686 - DNA, 14 bp, Artificial sequence
  Synthetic oligonucleotide
aaaataatccaaac

SEQ ID NO: 687 - DNA, 14 bp, Artificial sequence
  Synthetic oligonucleotide
caaaataatccaaa

SEQ ID NO: 688 - DNA, 14 bp, Artificial sequence
  Synthetic oligonucleotide
acaaaataatccaa

SEQ ID NO: 689 - DNA, 14 bp, Artificial sequence
  Synthetic oligonucleotide
tacaaaataatcca

SEQ ID NO: 690 - DNA, 14 bp, Artificial sequence
  Synthetic oligonucleotide
ttacaaaataatcc

SEQ ID NO: 691 - DNA, 14 bp, Artificial sequence
  Synthetic oligonucleotide
gttacaaaataatc

SEQ ID NO: 692 - DNA, 14 bp, Artificial sequence
  Synthetic oligonucleotide
tgttacaaaataat

SEQ ID NO: 693 - DNA, 14 bp, Artificial sequence
  Synthetic oligonucleotide
ttttacattaacta

SEQ ID NO: 694 - DNA, 14 bp, Artificial sequence
  Synthetic oligonucleotide
tttttacattaact

SEQ ID NO: 695 - DNA, 14 bp, Artificial sequence
  Synthetic oligonucleotide
ttttttacattaac

SEQ ID NO: 696 - DNA, 14 bp, Artificial sequence
  Synthetic oligonucleotide
attttttacattaa

SEQ ID NO: 697 - DNA, 14 bp, Artificial sequence
  Synthetic oligonucleotide
tattttttacatta

SEQ ID NO: 698 - DNA, 14 bp, Artificial sequence
  Synthetic oligonucleotide
ttattttttacatt

SEQ ID NO: 699 - DNA, 14 bp, Artificial sequence
  Synthetic oligonucleotide
aaatactaacatca

SEQ ID NO: 700 - DNA, 14 bp, Artificial sequence
  Synthetic oligonucleotide
aaaatactaacatc

SEQ ID NO: 701 - DNA, 14 bp, Artificial sequence
  Synthetic oligonucleotide
caaaatactaacat

SEQ ID NO: 702 - DNA, 14 bp, Artificial sequence
  Synthetic oligonucleotide
ccaaaatactaaca

SEQ ID NO: 703 - DNA, 14 bp, Artificial sequence
  Synthetic oligonucleotide
gccaaaatactaac

SEQ ID NO: 704 - DNA, 14 bp, Artificial sequence
  Synthetic oligonucleotide
tgccaaaatactaa

SEQ ID NO: 705 - DNA, 14 bp, Artificial sequence
  Synthetic oligonucleotide
tccattcattttat

SEQ ID NO: 706 - DNA, 14 bp, Artificial sequence
  Synthetic oligonucleotide
atccattcatttta

SEQ ID NO: 707 - DNA, 14 bp, Artificial sequence
  Synthetic oligonucleotide
catccattcatttt

SEQ ID NO: 708 - DNA, 14 bp, Artificial sequence
  Synthetic oligonucleotide
acatccattcattt

SEQ ID NO: 709 - DNA, 14 bp, Artificial sequence
  Synthetic oligonucleotide
cacatccattcatt

SEQ ID NO: 710 - DNA, 14 bp, Artificial sequence
  Synthetic oligonucleotide
ccacatccattcat

SEQ ID NO: 711 - DNA, 14 bp, Artificial sequence
  Synthetic oligonucleotide
gccacatccattca

SEQ ID NO: 712 - DNA, 14 bp, Artificial sequence
  Synthetic oligonucleotide
tgccacatccattc

SEQ ID NO: 713 - DNA, 14 bp, Artificial sequence
  Synthetic oligonucleotide
atgccacatccatt

SEQ ID NO: 714 - DNA, 14 bp, Artificial sequence
  Synthetic oligonucleotide
tatgccacatccat

SEQ ID NO: 715 - DNA, 14 bp, Artificial sequence
  Synthetic oligonucleotide
ttatgccacatcca

SEQ ID NO: 716 - DNA, 14 bp, Artificial sequence
  Synthetic oligonucleotide
attatgccacatcc

SEQ ID NO: 717 - DNA, 14 bp, Artificial sequence
  Synthetic oligonucleotide
tcttaactcttctc

SEQ ID NO: 718 - DNA, 14 bp, Artificial sequence
  Synthetic oligonucleotide
ttcttaactcttct

SEQ ID NO: 719 - DNA, 14 bp, Artificial sequence
  Synthetic oligonucleotide
gttcttaactcttc

SEQ ID NO: 720 - DNA, 14 bp, Artificial sequence
  Synthetic oligonucleotide
agttcttaactctt

SEQ ID NO: 721 - DNA, 14 bp, Artificial sequence
  Synthetic oligonucleotide
tagttcttaactct

SEQ ID NO: 722 - DNA, 14 bp, Artificial sequence
  Synthetic oligonucleotide
caaatactcaaaaa

SEQ ID NO: 723 - DNA, 14 bp, Artificial sequence
  Synthetic oligonucleotide
tcaaatactcaaaa

SEQ ID NO: 724 - DNA, 14 bp, Artificial sequence
  Synthetic oligonucleotide
ttcaaatactcaaa

SEQ ID NO: 725 - DNA, 14 bp, Artificial sequence
  Synthetic oligonucleotide
cttcaaatactcaa

SEQ ID NO: 726 - DNA, 14 bp, Artificial sequence
  Synthetic oligonucleotide
gcttcaaatactca

SEQ ID NO: 727 - DNA, 14 bp, Artificial sequence
  Synthetic oligonucleotide
agcttcaaatactc

SEQ ID NO: 728 - DNA, 14 bp, Artificial sequence
  Synthetic oligonucleotide
aagcttcaaatact

SEQ ID NO: 729 - DNA, 14 bp, Artificial sequence
  Synthetic oligonucleotide
cctcattacccatt

SEQ ID NO: 730 - DNA, 14 bp, Artificial sequence
  Synthetic oligonucleotide
tcctcattacccat

SEQ ID NO: 731 - DNA, 14 bp, Artificial sequence
  Synthetic oligonucleotide
atcctcattaccca

SEQ ID NO: 732 - DNA, 14 bp, Artificial sequence
  Synthetic oligonucleotide
tatcctcattaccc

SEQ ID NO: 733 - DNA, 14 bp, Artificial sequence
  Synthetic oligonucleotide
atatcctcattacc

SEQ ID NO: 734 - DNA, 14 bp, Artificial sequence
  Synthetic oligonucleotide
aatatcctcattac

SEQ ID NO: 735 - DNA, 14 bp, Artificial sequence
  Synthetic oligonucleotide
taatatcctcatta

SEQ ID NO: 736 - DNA, 14 bp, Artificial sequence
  Synthetic oligonucleotide
ttaatatcctcatt

SEQ ID NO: 737 - DNA, 14 bp, Artificial sequence
  Synthetic oligonucleotide
tttaatatcctcat

SEQ ID NO: 738 - DNA, 14 bp, Artificial sequence
  Synthetic oligonucleotide
atttaatatcctca

SEQ ID NO: 739 - DNA, 14 bp, Artificial sequence
  Synthetic oligonucleotide
aatttaatatcctc

SEQ ID NO: 740 - DNA, 14 bp, Artificial sequence
  Synthetic oligonucleotide
aaatttaatatcct

SEQ ID NO: 741 - DNA, 14 bp, Artificial sequence
  Synthetic oligonucleotide
taaatttaatatcc

SEQ ID NO: 742 - DNA, 14 bp, Artificial sequence
  Synthetic oligonucleotide
ttaaatttaatatc

SEQ ID NO: 743 - DNA, 14 bp, Artificial sequence
  Synthetic oligonucleotide
cttaaatttaatat

SEQ ID NO: 744 - DNA, 14 bp, Artificial sequence
  Synthetic oligonucleotide
tcttaaatttaata

SEQ ID NO: 745 - DNA, 14 bp, Artificial sequence
  Synthetic oligonucleotide
ttcttaaatttaat

SEQ ID NO: 746 - DNA, 14 bp, Artificial sequence
  Synthetic oligonucleotide
gttcttaaatttaa

SEQ ID NO: 747 - DNA, 14 bp, Artificial sequence
  Synthetic oligonucleotide
ttattctactttta

SEQ ID NO: 748 - DNA, 14 bp, Artificial sequence
  Synthetic oligonucleotide
tttattctactttt

SEQ ID NO: 749 - DNA, 14 bp, Artificial sequence
  Synthetic oligonucleotide
ctttattctacttt

SEQ ID NO: 750 - DNA, 14 bp, Artificial sequence
  Synthetic oligonucleotide
cctttattctactt

SEQ ID NO: 751 - DNA, 14 bp, Artificial sequence
  Synthetic oligonucleotide
gcctttattctact

SEQ ID NO: 752 - DNA, 14 bp, Artificial sequence
  Synthetic oligonucleotide
aacaattattaata

SEQ ID NO: 753 - DNA, 14 bp, Artificial sequence
  Synthetic oligonucleotide
caacaattattaat

SEQ ID NO: 754 - DNA, 14 bp, Artificial sequence
  Synthetic oligonucleotide
gcaacaattattaa

SEQ ID NO: 755 - DNA, 14 bp, Artificial sequence
  Synthetic oligonucleotide
agcaacaattatta

SEQ ID NO: 756 - DNA, 14 bp, Artificial sequence
  Synthetic oligonucleotide
cagcaacaattatt

SEQ ID NO: 757 - DNA, 14 bp, Artificial sequence
  Synthetic oligonucleotide
ccagcaacaattat

SEQ ID NO: 758 - DNA, 14 bp, Artificial sequence
  Synthetic oligonucleotide
accagcaacaatta

SEQ ID NO: 759 - DNA, 14 bp, Artificial sequence
  Synthetic oligonucleotide
aaaccaaaacttac

SEQ ID NO: 760 - DNA, 14 bp, Artificial sequence
  Synthetic oligonucleotide
aaaaccaaaactta

SEQ ID NO: 761 - DNA, 14 bp, Artificial sequence
  Synthetic oligonucleotide
aaaaaccaaaactt

SEQ ID NO: 762 - DNA, 14 bp, Artificial sequence
  Synthetic oligonucleotide
caaaaaccaaaact

SEQ ID NO: 763 - DNA, 14 bp, Artificial sequence
  Synthetic oligonucleotide
ccaaaaaccaaaac

SEQ ID NO: 764 - DNA, 14 bp, Artificial sequence
  Synthetic oligonucleotide
accaaaaaccaaaa

SEQ ID NO: 765 - DNA, 14 bp, Artificial sequence
  Synthetic oligonucleotide
aaccaaaaaccaaa

SEQ ID NO: 766 - DNA, 14 bp, Artificial sequence
  Synthetic oligonucleotide
aaaccaaaaaccaa

SEQ ID NO: 767 - DNA, 14 bp, Artificial sequence
  Synthetic oligonucleotide
atctaaaacacttc

SEQ ID NO: 768 - DNA, 14 bp, Artificial sequence
  Synthetic oligonucleotide
aatctaaaacactt

SEQ ID NO: 769 - DNA, 14 bp, Artificial sequence
  Synthetic oligonucleotide
aaatctaaaacact

SEQ ID NO: 770 - DNA, 14 bp, Artificial sequence
  Synthetic oligonucleotide
caaatctaaaacac

SEQ ID NO: 771 - DNA, 14 bp, Artificial sequence
  Synthetic oligonucleotide
ccaaatctaaaaca

SEQ ID NO: 772 - DNA, 14 bp, Artificial sequence
  Synthetic oligonucleotide
cccaaatctaaaac

SEQ ID NO: 773 - DNA, 14 bp, Artificial sequence
  Synthetic oligonucleotide
ccccaaatctaaaa

SEQ ID NO: 774 - DNA, 14 bp, Artificial sequence
  Synthetic oligonucleotide
accccaaatctaaa

SEQ ID NO: 775 - DNA, 14 bp, Artificial sequence
  Synthetic oligonucleotide
aaccccaaatctaa

SEQ ID NO: 776 - DNA, 14 bp, Artificial sequence
  Synthetic oligonucleotide
aaaccccaaatcta

SEQ ID NO: 777 - DNA, 14 bp, Artificial sequence
  Synthetic oligonucleotide
attcacaaatccta

SEQ ID NO: 778 - DNA, 14 bp, Artificial sequence
  Synthetic oligonucleotide
tattcacaaatcct

SEQ ID NO: 779 - DNA, 14 bp, Artificial sequence
  Synthetic oligonucleotide
atattcacaaatcc

SEQ ID NO: 780 - DNA, 14 bp, Artificial sequence
  Synthetic oligonucleotide
aatattcacaaatc

SEQ ID NO: 781 - DNA, 14 bp, Artificial sequence
  Synthetic oligonucleotide
aaatattcacaaat

SEQ ID NO: 782 - DNA, 14 bp, Artificial sequence
  Synthetic oligonucleotide
caaatattcacaaa

SEQ ID NO: 783 - DNA, 14 bp, Artificial sequence
  Synthetic oligonucleotide
gcaaatattcacaa

SEQ ID NO: 784 - DNA, 14 bp, Artificial sequence
  Synthetic oligonucleotide
aacacacattatca

SEQ ID NO: 785 - DNA, 14 bp, Artificial sequence
  Synthetic oligonucleotide
taacacacattatc

SEQ ID NO: 786 - DNA, 14 bp, Artificial sequence
  Synthetic oligonucleotide
ttaacacacattat

SEQ ID NO: 787 - DNA, 14 bp, Artificial sequence
  Synthetic oligonucleotide
tttaacacacatta

SEQ ID NO: 788 - DNA, 14 bp, Artificial sequence
  Synthetic oligonucleotide
atttaacacacatt

SEQ ID NO: 789 - DNA, 14 bp, Artificial sequence
  Synthetic oligonucleotide
tatttaacacacat

SEQ ID NO: 790 - DNA, 14 bp, Artificial sequence
  Synthetic oligonucleotide
ctatttaacacaca

SEQ ID NO: 791 - DNA, 14 bp, Artificial sequence
  Synthetic oligonucleotide
actatttaacacac

SEQ ID NO: 792 - DNA, 14 bp, Artificial sequence
  Synthetic oligonucleotide
tactatttaacaca

SEQ ID NO: 793 - DNA, 14 bp, Artificial sequence
  Synthetic oligonucleotide
ctactatttaacac

SEQ ID NO: 794 - DNA, 14 bp, Artificial sequence
  Synthetic oligonucleotide
actactatttaaca

SEQ ID NO: 795 - DNA, 14 bp, Artificial sequence
  Synthetic oligonucleotide
aactactatttaac

SEQ ID NO: 796 - DNA, 14 bp, Artificial sequence
  Synthetic oligonucleotide
aaactactatttaa

SEQ ID NO: 797 - DNA, 14 bp, Artificial sequence
  Synthetic oligonucleotide
aaaactactattta

SEQ ID NO: 798 - DNA, 14 bp, Artificial sequence
  Synthetic oligonucleotide
gaaaactactattt

SEQ ID NO: 799 - DNA, 14 bp, Artificial sequence
  Synthetic oligonucleotide
tgaaaactactatt

SEQ ID NO: 800 - DNA, 14 bp, Artificial sequence
  Synthetic oligonucleotide
aaataacctatcat

SEQ ID NO: 801 - DNA, 14 bp, Artificial sequence
  Synthetic oligonucleotide
aaaataacctatca

SEQ ID NO: 802 - DNA, 14 bp, Artificial sequence
  Synthetic oligonucleotide
caaaataacctatc

SEQ ID NO: 803 - DNA, 14 bp, Artificial sequence
  Synthetic oligonucleotide
acaaaataacctat

SEQ ID NO: 804 - DNA, 14 bp, Artificial sequence
  Synthetic oligonucleotide
cacaaaataaccta

SEQ ID NO: 805 - DNA, 14 bp, Artificial sequence
  Synthetic oligonucleotide
tcacaaaataacct

SEQ ID NO: 806 - DNA, 14 bp, Artificial sequence
  Synthetic oligonucleotide
atcacaaaataacc

SEQ ID NO: 807 - DNA, 14 bp, Artificial sequence
  Synthetic oligonucleotide
catcacaaaataac

SEQ ID NO: 808 - DNA, 14 bp, Artificial sequence
  Synthetic oligonucleotide
tcatcacaaaataa

SEQ ID NO: 809 - DNA, 14 bp, Artificial sequence
  Synthetic oligonucleotide
ttcatcacaaaata

SEQ ID NO: 810 - DNA, 14 bp, Artificial sequence
  Synthetic oligonucleotide
tttcatcacaaaat

SEQ ID NO: 811 - DNA, 14 bp, Artificial sequence
  Synthetic oligonucleotide
ttttcatcacaaaa

SEQ ID NO: 812 - DNA, 14 bp, Artificial sequence
  Synthetic oligonucleotide
attttcatcacaaa

SEQ ID NO: 813 - DNA, 14 bp, Artificial sequence
  Synthetic oligonucleotide
tattttcatcacaa

SEQ ID NO: 814 - DNA, 14 bp, Artificial sequence
  Synthetic oligonucleotide
gtattttcatcaca

SEQ ID NO: 815 - DNA, 14 bp, Artificial sequence
  Synthetic oligonucleotide
atttaaatttatca

SEQ ID NO: 816 - DNA, 14 bp, Artificial sequence
  Synthetic oligonucleotide
aatttaaatttatc

SEQ ID NO: 817 - DNA, 14 bp, Artificial sequence
  Synthetic oligonucleotide
aaatttaaatttat

SEQ ID NO: 818 - DNA, 14 bp, Artificial sequence
  Synthetic oligonucleotide
aaaatttaaattta

SEQ ID NO: 819 - DNA, 14 bp, Artificial sequence
  Synthetic oligonucleotide
taaaatttaaattt

SEQ ID NO: 820 - DNA, 14 bp, Artificial sequence
  Synthetic oligonucleotide
ataaaatttaaatt

SEQ ID NO: 821 - DNA, 14 bp, Artificial sequence
  Synthetic oligonucleotide
cataaaatttaaat

SEQ ID NO: 822 - DNA, 14 bp, Artificial sequence
  Synthetic oligonucleotide
acataaaatttaaa

SEQ ID NO: 823 - DNA, 14 bp, Artificial sequence
  Synthetic oligonucleotide
ctactaatattcat

SEQ ID NO: 824 - DNA, 14 bp, Artificial sequence
  Synthetic oligonucleotide
cctactaatattca

SEQ ID NO: 825 - DNA, 14 bp, Artificial sequence
  Synthetic oligonucleotide
acctactaatattc

SEQ ID NO: 826 - DNA, 14 bp, Artificial sequence
  Synthetic oligonucleotide
cacctactaatatt

SEQ ID NO: 827 - DNA, 14 bp, Artificial sequence
  Synthetic oligonucleotide
tcacctactaatat

SEQ ID NO: 828 - DNA, 14 bp, Artificial sequence
  Synthetic oligonucleotide
ttcacctactaata

SEQ ID NO: 829 - DNA, 14 bp, Artificial sequence
  Synthetic oligonucleotide
tttcacctactaat

SEQ ID NO: 830 - DNA, 14 bp, Artificial sequence
  Synthetic oligonucleotide
ttttcacctactaa

SEQ ID NO: 831 - DNA, 14 bp, Artificial sequence
  Synthetic oligonucleotide
tttttcacctacta

SEQ ID NO: 832 - DNA, 14 bp, Artificial sequence
  Synthetic oligonucleotide
atttttcacctact

SEQ ID NO: 833 - DNA, 14 bp, Artificial sequence
  Synthetic oligonucleotide
tatttttcacctac

SEQ ID NO: 834 - DNA, 14 bp, Artificial sequence
  Synthetic oligonucleotide
ttatttttcaccta

SEQ ID NO: 835 - DNA, 14 bp, Artificial sequence
  Synthetic oligonucleotide
tttatttttcacct

SEQ ID NO: 836 - DNA, 14 bp, Artificial sequence
  Synthetic oligonucleotide
ttctactactaatt

SEQ ID NO: 837 - DNA, 14 bp, Artificial sequence
  Synthetic oligonucleotide
cttctactactaat

SEQ ID NO: 838 - DNA, 14 bp, Artificial sequence
  Synthetic oligonucleotide
acttctactactaa

SEQ ID NO: 839 - DNA, 14 bp, Artificial sequence
  Synthetic oligonucleotide
aacttctactacta

SEQ ID NO: 840 - DNA, 14 bp, Artificial sequence
  Synthetic oligonucleotide
caacttctactact

SEQ ID NO: 841 - DNA, 14 bp, Artificial sequence
  Synthetic oligonucleotide
tcaacttctactac

SEQ ID NO: 842 - DNA, 14 bp, Artificial sequence
  Synthetic oligonucleotide
ctcaacttctacta

SEQ ID NO: 843 - DNA, 14 bp, Artificial sequence
  Synthetic oligonucleotide
tctcaacttctact

SEQ ID NO: 844 - DNA, 14 bp, Artificial sequence
  Synthetic oligonucleotide
ctctcaacttctac

SEQ ID NO: 845 - DNA, 14 bp, Artificial sequence
  Synthetic oligonucleotide
tctctcaacttcta

SEQ ID NO: 846 - DNA, 14 bp, Artificial sequence
  Synthetic oligonucleotide
ttctctcaacttct

SEQ ID NO: 847 - DNA, 14 bp, Artificial sequence
  Synthetic oligonucleotide
tttctctcaacttc

SEQ ID NO: 848 - DNA, 14 bp, Artificial sequence
  Synthetic oligonucleotide
ttttctctcaactt

SEQ ID NO: 849 - DNA, 14 bp, Artificial sequence
  Synthetic oligonucleotide
tttttctctcaact

SEQ ID NO: 850 - DNA, 14 bp, Artificial sequence
  Synthetic oligonucleotide
ctttttctctcaac

SEQ ID NO: 851 - DNA, 14 bp, Artificial sequence
  Synthetic oligonucleotide
actttttctctcaa

SEQ ID NO: 852 - DNA, 14 bp, Artificial sequence
  Synthetic oligonucleotide
tactttttctctca

SEQ ID NO: 853 - DNA, 14 bp, Artificial sequence
  Synthetic oligonucleotide
ttactttttctctc

SEQ ID NO: 854 - DNA, 14 bp, Artificial sequence
  Synthetic oligonucleotide
gttactttttctct

SEQ ID NO: 855 - DNA, 14 bp, Artificial sequence
  Synthetic oligonucleotide
agttactttttctc

SEQ ID NO: 856 - DNA, 14 bp, Artificial sequence
  Synthetic oligonucleotide
cattcccattaaca

SEQ ID NO: 857 - DNA, 14 bp, Artificial sequence
  Synthetic oligonucleotide
acattcccattaac

SEQ ID NO: 858 - DNA, 14 bp, Artificial sequence
  Synthetic oligonucleotide
tacattcccattaa

SEQ ID NO: 859 - DNA, 14 bp, Artificial sequence
  Synthetic oligonucleotide
ttacattcccatta

SEQ ID NO: 860 - DNA, 14 bp, Artificial sequence
  Synthetic oligonucleotide
tttacattcccatt

SEQ ID NO: 861 - DNA, 14 bp, Artificial sequence
  Synthetic oligonucleotide
ttttacattcccat

SEQ ID NO: 862 - DNA, 14 bp, Artificial sequence
  Synthetic oligonucleotide
cttttacattccca

SEQ ID NO: 863 - DNA, 14 bp, Artificial sequence
  Synthetic oligonucleotide
acttttacattccc

SEQ ID NO: 864 - DNA, 14 bp, Artificial sequence
  Synthetic oligonucleotide
cacttttacattcc

SEQ ID NO: 865 - DNA, 14 bp, Artificial sequence
  Synthetic oligonucleotide
acacttttacattc

SEQ ID NO: 866 - DNA, 14 bp, Artificial sequence
  Synthetic oligonucleotide
tacacttttacatt

SEQ ID NO: 867 - DNA, 14 bp, Artificial sequence
  Synthetic oligonucleotide
gtacacttttacat

SEQ ID NO: 868 - DNA, 14 bp, Artificial sequence
  Synthetic oligonucleotide
tgtacacttttaca

SEQ ID NO: 869 - DNA, 14 bp, Artificial sequence
  Synthetic oligonucleotide
tttatcaaaaaaat

SEQ ID NO: 870 - DNA, 14 bp, Artificial sequence
  Synthetic oligonucleotide
atttatcaaaaaaa

SEQ ID NO: 871 - DNA, 14 bp, Artificial sequence
  Synthetic oligonucleotide
catttatcaaaaaa

SEQ ID NO: 872 - DNA, 14 bp, Artificial sequence
  Synthetic oligonucleotide
acatttatcaaaaa

SEQ ID NO: 873 - DNA, 14 bp, Artificial sequence
  Synthetic oligonucleotide
tacatttatcaaaa

SEQ ID NO: 874 - DNA, 14 bp, Artificial sequence
  Synthetic oligonucleotide
atacatttatcaaa

SEQ ID NO: 875 - DNA, 14 bp, Artificial sequence
  Synthetic oligonucleotide
tatacatttatcaa

SEQ ID NO: 876 - DNA, 14 bp, Artificial sequence
  Synthetic oligonucleotide
acatcttccaattt

SEQ ID NO: 877 - DNA, 14 bp, Artificial sequence
  Synthetic oligonucleotide
tacatcttccaatt

SEQ ID NO: 878 - DNA, 14 bp, Artificial sequence
  Synthetic oligonucleotide
ttacatcttccaat

SEQ ID NO: 879 - DNA, 14 bp, Artificial sequence
  Synthetic oligonucleotide
tttacatcttccaa

SEQ ID NO: 880 - DNA, 14 bp, Artificial sequence
  Synthetic oligonucleotide
atttacatcttcca

SEQ ID NO: 881 - DNA, 14 bp, Artificial sequence
  Synthetic oligonucleotide
tatttacatcttcc

SEQ ID NO: 882 - DNA, 14 bp, Artificial sequence
  Synthetic oligonucleotide
ttatttacatcttc

SEQ ID NO: 883 - DNA, 14 bp, Artificial sequence
  Synthetic oligonucleotide
cttatttacatctt

SEQ ID NO: 884 - DNA, 14 bp, Artificial sequence
  Synthetic oligonucleotide
tcttatttacatct

SEQ ID NO: 885 - DNA, 14 bp, Artificial sequence
  Synthetic oligonucleotide
atcttatttacatc

SEQ ID NO: 886 - DNA, 14 bp, Artificial sequence
  Synthetic oligonucleotide
aatcttatttacat

SEQ ID NO: 887 - DNA, 14 bp, Artificial sequence
  Synthetic oligonucleotide
gaatcttatttaca

SEQ ID NO: 888 - DNA, 14 bp, Artificial sequence
  Synthetic oligonucleotide
tgaatcttatttac

SEQ ID NO: 889 - DNA, 14 bp, Artificial sequence
  Synthetic oligonucleotide
ttcccttcactcct

SEQ ID NO: 890 - DNA, 14 bp, Artificial sequence
  Synthetic oligonucleotide
tttcccttcactcc

SEQ ID NO: 891 - DNA, 14 bp, Artificial sequence
  Synthetic oligonucleotide
ttttcccttcactc

SEQ ID NO: 892 - DNA, 14 bp, Artificial sequence
  Synthetic oligonucleotide
attttcccttcact

SEQ ID NO: 893 - DNA, 14 bp, Artificial sequence
  Synthetic oligonucleotide
aattttcccttcac

SEQ ID NO: 894 - DNA, 14 bp, Artificial sequence
  Synthetic oligonucleotide
taattttcccttca

SEQ ID NO: 895 - DNA, 14 bp, Artificial sequence
  Synthetic oligonucleotide
ttaattttcccttc

SEQ ID NO: 896 - DNA, 14 bp, Artificial sequence
  Synthetic oligonucleotide
gttaattttccctt

SEQ ID NO: 897 - DNA, 14 bp, Artificial sequence
  Synthetic oligonucleotide
tttatcatttcttt

SEQ ID NO: 898 - DNA, 14 bp, Artificial sequence
  Synthetic oligonucleotide
ttttatcatttctt

SEQ ID NO: 899 - DNA, 14 bp, Artificial sequence
  Synthetic oligonucleotide
cttttatcatttct

SEQ ID NO: 900 - DNA, 14 bp, Artificial sequence
  Synthetic oligonucleotide
tcttttatcatttc

SEQ ID NO: 901 - DNA, 14 bp, Artificial sequence
  Synthetic oligonucleotide
ttcttttatcattt

SEQ ID NO: 902 - DNA, 14 bp, Artificial sequence
  Synthetic oligonucleotide
cttcttttatcatt

SEQ ID NO: 903 - DNA, 14 bp, Artificial sequence
  Synthetic oligonucleotide
acttcttttatcat

SEQ ID NO: 904 - DNA, 14 bp, Artificial sequence
  Synthetic oligonucleotide
tacttcttttatca

SEQ ID NO: 905 - DNA, 14 bp, Artificial sequence
  Synthetic oligonucleotide
ttacttcttttatc

SEQ ID NO: 906 - DNA, 14 bp, Artificial sequence
  Synthetic oligonucleotide
attacttcttttat

SEQ ID NO: 907 - DNA, 14 bp, Artificial sequence
  Synthetic oligonucleotide
aattacttctttta

SEQ ID NO: 908 - DNA, 14 bp, Artificial sequence
  Synthetic oligonucleotide
aaattacttctttt

SEQ ID NO: 909 - DNA, 14 bp, Artificial sequence
  Synthetic oligonucleotide
aaaattacttcttt

SEQ ID NO: 910 - DNA, 14 bp, Artificial sequence
  Synthetic oligonucleotide
caaaattacttctt

SEQ ID NO: 911 - DNA, 14 bp, Artificial sequence
  Synthetic oligonucleotide
ccaaaattacttct

SEQ ID NO: 912 - DNA, 14 bp, Artificial sequence
  Synthetic oligonucleotide
tccaaaattacttc

SEQ ID NO: 913 - DNA, 14 bp, Artificial sequence
  Synthetic oligonucleotide
ttccaaaattactt

SEQ ID NO: 914 - DNA, 14 bp, Artificial sequence
  Synthetic oligonucleotide
gttccaaaattact

SEQ ID NO: 915 - DNA, 14 bp, Artificial sequence
  Synthetic oligonucleotide
tgttccaaaattac

SEQ ID NO: 916 - DNA, 14 bp, Artificial sequence
  Synthetic oligonucleotide
atgttccaaaatta

SEQ ID NO: 917 - DNA, 14 bp, Artificial sequence
  Synthetic oligonucleotide
ttactctttttatt

SEQ ID NO: 918 - DNA, 14 bp, Artificial sequence
  Synthetic oligonucleotide
tttactctttttat

SEQ ID NO: 919 - DNA, 14 bp, Artificial sequence
  Synthetic oligonucleotide
ttttactcttttta

SEQ ID NO: 920 - DNA, 14 bp, Artificial sequence
  Synthetic oligonucleotide
attttactcttttt

SEQ ID NO: 921 - DNA, 14 bp, Artificial sequence
  Synthetic oligonucleotide
tattttactctttt

SEQ ID NO: 922 - DNA, 14 bp, Artificial sequence
  Synthetic oligonucleotide
atattttactcttt

SEQ ID NO: 923 - DNA, 14 bp, Artificial sequence
  Synthetic oligonucleotide
catattttactctt

SEQ ID NO: 924 - DNA, 14 bp, Artificial sequence
  Synthetic oligonucleotide
ccatattttactct

SEQ ID NO: 925 - DNA, 14 bp, Artificial sequence
  Synthetic oligonucleotide
cccatattttactc

SEQ ID NO: 926 - DNA, 14 bp, Artificial sequence
  Synthetic oligonucleotide
acccatattttact

SEQ ID NO: 927 - DNA, 14 bp, Artificial sequence
  Synthetic oligonucleotide
tacccatattttac

SEQ ID NO: 928 - DNA, 14 bp, Artificial sequence
  Synthetic oligonucleotide
ttacccatatttta

SEQ ID NO: 929 - DNA, 14 bp, Artificial sequence
  Synthetic oligonucleotide
tttacccatatttt

SEQ ID NO: 930 - DNA, 14 bp, Artificial sequence
  Synthetic oligonucleotide
gtttacccatattt

SEQ ID NO: 931 - DNA, 14 bp, Artificial sequence
  Synthetic oligonucleotide
tgtttacccatatt

SEQ ID NO: 932 - DNA, 14 bp, Artificial sequence
  Synthetic oligonucleotide
gttacctcccttta

SEQ ID NO: 933 - DNA, 14 bp, Artificial sequence
  Synthetic oligonucleotide
ggttacctcccttt

SEQ ID NO: 934 - DNA, 14 bp, Artificial sequence
  Synthetic oligonucleotide
aggttacctccctt

SEQ ID NO: 935 - DNA, 14 bp, Artificial sequence
  Synthetic oligonucleotide
caaactaaaaccta

SEQ ID NO: 936 - DNA, 14 bp, Artificial sequence
  Synthetic oligonucleotide
tcaaactaaaacct

SEQ ID NO: 937 - DNA, 14 bp, Artificial sequence
  Synthetic oligonucleotide
atcaaactaaaacc

SEQ ID NO: 938 - DNA, 14 bp, Artificial sequence
  Synthetic oligonucleotide
gatcaaactaaaac

SEQ ID NO: 939 - DNA, 14 bp, Artificial sequence
  Synthetic oligonucleotide
agatcaaactaaaa

SEQ ID NO: 940 - DNA, 14 bp, Artificial sequence
  Synthetic oligonucleotide
aagatcaaactaaa

SEQ ID NO: 941 - DNA, 14 bp, Artificial sequence
  Synthetic oligonucleotide
ccaatttcacccaa

SEQ ID NO: 942 - DNA, 14 bp, Artificial sequence
  Synthetic oligonucleotide
cccaatttcaccca

SEQ ID NO: 943 - DNA, 14 bp, Artificial sequence
  Synthetic oligonucleotide
gcccaatttcaccc

SEQ ID NO: 944 - DNA, 14 bp, Artificial sequence
  Synthetic oligonucleotide
tgcccaatttcacc

SEQ ID NO: 945 - DNA, 14 bp, Artificial sequence
  Synthetic oligonucleotide
ttgcccaatttcac

SEQ ID NO: 946 - DNA, 14 bp, Artificial sequence
  Synthetic oligonucleotide
caactttctatttt

SEQ ID NO: 947 - DNA, 14 bp, Artificial sequence
  Synthetic oligonucleotide
ccaactttctattt

SEQ ID NO: 948 - DNA, 14 bp, Artificial sequence
  Synthetic oligonucleotide
cccaactttctatt

SEQ ID NO: 949 - DNA, 14 bp, Artificial sequence
  Synthetic oligonucleotide
acccaactttctat

SEQ ID NO: 950 - DNA, 14 bp, Artificial sequence
  Synthetic oligonucleotide
aacccaactttcta

SEQ ID NO: 951 - DNA, 14 bp, Artificial sequence
  Synthetic oligonucleotide
aaacccaactttct

SEQ ID NO: 952 - DNA, 14 bp, Artificial sequence
  Synthetic oligonucleotide
aaaacccaactttc

SEQ ID NO: 953 - DNA, 14 bp, Artificial sequence
  Synthetic oligonucleotide
aaaaacccaacttt

SEQ ID NO: 954 - DNA, 14 bp, Artificial sequence
  Synthetic oligonucleotide
caaaaacccaactt

SEQ ID NO: 955 - DNA, 14 bp, Artificial sequence
  Synthetic oligonucleotide
acaaaaacccaact

SEQ ID NO: 956 - DNA, 14 bp, Artificial sequence
  Synthetic oligonucleotide
ctttaaaatttcca

SEQ ID NO: 957 - DNA, 14 bp, Artificial sequence
  Synthetic oligonucleotide
tctttaaaatttcc

SEQ ID NO: 958 - DNA, 14 bp, Artificial sequence
  Synthetic oligonucleotide
ttctttaaaatttc

SEQ ID NO: 959 - DNA, 14 bp, Artificial sequence
  Synthetic oligonucleotide
tttctttaaaattt

SEQ ID NO: 960 - DNA, 14 bp, Artificial sequence
  Synthetic oligonucleotide
atttctttaaaatt

SEQ ID NO: 961 - DNA, 14 bp, Artificial sequence
  Synthetic oligonucleotide
catttctttaaaat

SEQ ID NO: 962 - DNA, 14 bp, Artificial sequence
  Synthetic oligonucleotide
acatttctttaaaa

SEQ ID NO: 963 - DNA, 14 bp, Artificial sequence
  Synthetic oligonucleotide
cacatttctttaaa

SEQ ID NO: 964 - DNA, 14 bp, Artificial sequence
  Synthetic oligonucleotide
ccacatttctttaa

SEQ ID NO: 965 - DNA, 14 bp, Artificial sequence
  Synthetic oligonucleotide
accacatttcttta

SEQ ID NO: 966 - DNA, 14 bp, Artificial sequence
  Synthetic oligonucleotide
aaccacatttcttt

SEQ ID NO: 967 - DNA, 14 bp, Artificial sequence
  Synthetic oligonucleotide
aaaccacatttctt

SEQ ID NO: 968 - DNA, 14 bp, Artificial sequence
  Synthetic oligonucleotide
aaaaccacatttct

SEQ ID NO: 969 - DNA, 14 bp, Artificial sequence
  Synthetic oligonucleotide
caaaaccacatttc

SEQ ID NO: 970 - DNA, 14 bp, Artificial sequence
  Synthetic oligonucleotide
ttcttctcttttca

SEQ ID NO: 971 - DNA, 14 bp, Artificial sequence
  Synthetic oligonucleotide
tttcttctcttttc

SEQ ID NO: 972 - DNA, 14 bp, Artificial sequence
  Synthetic oligonucleotide
ttttcttctctttt

SEQ ID NO: 973 - DNA, 14 bp, Artificial sequence
  Synthetic oligonucleotide
tttttcttctcttt

SEQ ID NO: 974 - DNA, 14 bp, Artificial sequence
  Synthetic oligonucleotide
ttttttcttctctt

SEQ ID NO: 975 - DNA, 14 bp, Artificial sequence
  Synthetic oligonucleotide
attttttcttctct

SEQ ID NO: 976 - DNA, 14 bp, Artificial sequence
  Synthetic oligonucleotide
tattttttcttctc

SEQ ID NO: 977 - DNA, 14 bp, Artificial sequence
  Synthetic oligonucleotide
aacttaatattaaa

SEQ ID NO: 978 - DNA, 14 bp, Artificial sequence
  Synthetic oligonucleotide
caacttaatattaa

SEQ ID NO: 979 - DNA, 14 bp, Artificial sequence
  Synthetic oligonucleotide
tcaacttaatatta

SEQ ID NO: 980 - DNA, 14 bp, Artificial sequence
  Synthetic oligonucleotide
ttcaacttaatatt

SEQ ID NO: 981 - DNA, 14 bp, Artificial sequence
  Synthetic oligonucleotide
attcaacttaatat

SEQ ID NO: 982 - DNA, 14 bp, Artificial sequence
  Synthetic oligonucleotide
tattcaacttaata

SEQ ID NO: 983 - DNA, 14 bp, Artificial sequence
  Synthetic oligonucleotide
ttattcaacttaat

SEQ ID NO: 984 - DNA, 14 bp, Artificial sequence
  Synthetic oligonucleotide
tttattcaacttaa

SEQ ID NO: 985 - DNA, 14 bp, Artificial sequence
  Synthetic oligonucleotide
caaattaaaaaaca

SEQ ID NO: 986 - DNA, 14 bp, Artificial sequence
  Synthetic oligonucleotide
tcaaattaaaaaac

SEQ ID NO: 987 - DNA, 14 bp, Artificial sequence
  Synthetic oligonucleotide
ttcaaattaaaaaa

SEQ ID NO: 988 - DNA, 14 bp, Artificial sequence
  Synthetic oligonucleotide
cttcaaattaaaaa

SEQ ID NO: 989 - DNA, 14 bp, Artificial sequence
  Synthetic oligonucleotide
tcttcaaattaaaa

SEQ ID NO: 990 - DNA, 14 bp, Artificial sequence
  Synthetic oligonucleotide
ttcttcaaattaaa

SEQ ID NO: 991 - DNA, 14 bp, Artificial sequence
  Synthetic oligonucleotide
tttcttcaaattaa

SEQ ID NO: 992 - DNA, 14 bp, Artificial sequence
  Synthetic oligonucleotide
aacacaaattcaaa

SEQ ID NO: 993 - DNA, 14 bp, Artificial sequence
  Synthetic oligonucleotide
aaacacaaattcaa

SEQ ID NO: 994 - DNA, 14 bp, Artificial sequence
  Synthetic oligonucleotide
taaacacaaattca

SEQ ID NO: 995 - DNA, 14 bp, Artificial sequence
  Synthetic oligonucleotide
ataaacacaaattc

SEQ ID NO: 996 - DNA, 14 bp, Artificial sequence
  Synthetic oligonucleotide
aataaacacaaatt

SEQ ID NO: 997 - DNA, 14 bp, Artificial sequence
  Synthetic oligonucleotide
caataaacacaaat

SEQ ID NO: 998 - DNA, 14 bp, Artificial sequence
  Synthetic oligonucleotide
acaataaacacaaa

SEQ ID NO: 999 - DNA, 14 bp, Artificial sequence
  Synthetic oligonucleotide
aacaataaacacaa

SEQ ID NO: 1000 - DNA, 14 bp, Artificial sequence
  Synthetic oligonucleotide
taacaataaacaca

SEQ ID NO: 1001 - DNA, 14 bp, Artificial sequence
  Synthetic oligonucleotide
ttaacaataaacac

SEQ ID NO: 1002 - DNA, 14 bp, Artificial sequence
  Synthetic oligonucleotide
attaacaataaaca

SEQ ID NO: 1003 - DNA, 14 bp, Artificial sequence
  Synthetic oligonucleotide
aattaacaataaac

SEQ ID NO: 1004 - DNA, 14 bp, Artificial sequence
  Synthetic oligonucleotide
gaattaacaataaa

SEQ ID NO: 1005 - DNA, 14 bp, Artificial sequence
  Synthetic oligonucleotide
tgaattaacaataa

SEQ ID NO: 1006 - DNA, 14 bp, Artificial sequence
  Synthetic oligonucleotide
atattcctcaatca

SEQ ID NO: 1007 - DNA, 14 bp, Artificial sequence
  Synthetic oligonucleotide
tatattcctcaatc

SEQ ID NO: 1008 - DNA, 14 bp, Artificial sequence
  Synthetic oligonucleotide
atatattcctcaat

SEQ ID NO: 1009 - DNA, 14 bp, Artificial sequence
  Synthetic oligonucleotide
aatatattcctcaa

SEQ ID NO: 1010 - DNA, 14 bp, Artificial sequence
  Synthetic oligonucleotide
caatatattcctca

SEQ ID NO: 1011 - DNA, 14 bp, Artificial sequence
  Synthetic oligonucleotide
acaatatattcctc

SEQ ID NO: 1012 - DNA, 14 bp, Artificial sequence
  Synthetic oligonucleotide
gacaatatattcct

SEQ ID NO: 1013 - DNA, 14 bp, Artificial sequence
  Synthetic oligonucleotide
caatcctaattaaa

SEQ ID NO: 1014 - DNA, 14 bp, Artificial sequence
  Synthetic oligonucleotide
ccaatcctaattaa

SEQ ID NO: 1015 - DNA, 14 bp, Artificial sequence
  Synthetic oligonucleotide
cccaatcctaatta

SEQ ID NO: 1016 - DNA, 14 bp, Artificial sequence
  Synthetic oligonucleotide
gcccaatcctaatt

SEQ ID NO: 1017 - DNA, 14 bp, Artificial sequence
  Synthetic oligonucleotide
tgcccaatcctaat

SEQ ID NO: 1018 - DNA, 14 bp, Artificial sequence
  Synthetic oligonucleotide
accctacaaatact

SEQ ID NO: 1019 - DNA, 14 bp, Artificial sequence
  Synthetic oligonucleotide
aaccctacaaatac

SEQ ID NO: 1020 - DNA, 14 bp, Artificial sequence
  Synthetic oligonucleotide
aaaccctacaaata

SEQ ID NO: 1021 - DNA, 14 bp, Artificial sequence
  Synthetic oligonucleotide
aaaaccctacaaat

SEQ ID NO: 1022 - DNA, 14 bp, Artificial sequence
  Synthetic oligonucleotide
aaaaaccctacaaa

SEQ ID NO: 1023 - DNA, 14 bp, Artificial sequence
  Synthetic oligonucleotide
aaaaaaccctacaa

SEQ ID NO: 1024 - DNA, 14 bp, Artificial sequence
  Synthetic oligonucleotide
aaaaaaaccctaca

SEQ ID NO: 1025 - DNA, 14 bp, Artificial sequence
  Synthetic oligonucleotide
tatacactattaat

SEQ ID NO: 1026 - DNA, 14 bp, Artificial sequence
  Synthetic oligonucleotide
ttatacactattaa

SEQ ID NO: 1027 - DNA, 14 bp, Artificial sequence
  Synthetic oligonucleotide
attatacactatta

SEQ ID NO: 1028 - DNA, 14 bp, Artificial sequence
  Synthetic oligonucleotide
aattatacactatt

SEQ ID NO: 1029 - DNA, 14 bp, Artificial sequence
  Synthetic oligonucleotide
gaattatacactat

SEQ ID NO: 1030 - DNA, 14 bp, Artificial sequence
  Synthetic oligonucleotide
gtaacaattataca

SEQ ID NO: 1031 - DNA, 14 bp, Artificial sequence
  Synthetic oligonucleotide
tgtaacaattatac

SEQ ID NO: 1032 - DNA, 14 bp, Artificial sequence
  Synthetic oligonucleotide
ctgtaacaattata

SEQ ID NO: 1033 - DNA, 14 bp, Artificial sequence
  Synthetic oligonucleotide
cctgtaacaattat

SEQ ID NO: 1034 - DNA, 14 bp, Artificial sequence
  Synthetic oligonucleotide
tcctgtaacaatta

SEQ ID NO: 1035 - DNA, 14 bp, Artificial sequence
  Synthetic oligonucleotide
ataaaaaccacctt

SEQ ID NO: 1036 - DNA, 14 bp, Artificial sequence
  Synthetic oligonucleotide
aataaaaaccacct

SEQ ID NO: 1037 - DNA, 14 bp, Artificial sequence
  Synthetic oligonucleotide
gaataaaaaccacc

SEQ ID NO: 1038 - DNA, 14 bp, Artificial sequence
  Synthetic oligonucleotide
agaataaaaaccac

SEQ ID NO: 1039 - DNA, 14 bp, Artificial sequence
  Synthetic oligonucleotide
cagaataaaaacca

SEQ ID NO: 1040 - DNA, 14 bp, Artificial sequence
  Synthetic oligonucleotide
ccagaataaaaacc

SEQ ID NO: 1041 - DNA, 14 bp, Artificial sequence
  Synthetic oligonucleotide
cccagaataaaaac

SEQ ID NO: 1042 - DNA, 14 bp, Artificial sequence
  Synthetic oligonucleotide
acccagaataaaaa

SEQ ID NO: 1043 - DNA, 14 bp, Artificial sequence
  Synthetic oligonucleotide
tttcttactcccct

SEQ ID NO: 1044 - DNA, 14 bp, Artificial sequence
  Synthetic oligonucleotide
ctttcttactcccc

SEQ ID NO: 1045 - DNA, 14 bp, Artificial sequence
  Synthetic oligonucleotide
actttcttactccc

SEQ ID NO: 1046 - DNA, 14 bp, Artificial sequence
  Synthetic oligonucleotide
cactttcttactcc

SEQ ID NO: 1047 - DNA, 14 bp, Artificial sequence
  Synthetic oligonucleotide
ccactttcttactc

SEQ ID NO: 1048 - DNA, 14 bp, Artificial sequence
  Synthetic oligonucleotide
cctttaccactttt

SEQ ID NO: 1049 - DNA, 14 bp, Artificial sequence
  Synthetic oligonucleotide
ccctttaccacttt

SEQ ID NO: 1050 - DNA, 14 bp, Artificial sequence
  Synthetic oligonucleotide
tccctttaccactt

SEQ ID NO: 1051 - DNA, 14 bp, Artificial sequence
  Synthetic oligonucleotide
atccctttaccact

SEQ ID NO: 1052 - DNA, 14 bp, Artificial sequence
  Synthetic oligonucleotide
catccctttaccac

SEQ ID NO: 1053 - DNA, 14 bp, Artificial sequence
  Synthetic oligonucleotide
ctacatctaacccc

SEQ ID NO: 1054 - DNA, 14 bp, Artificial sequence
  Synthetic oligonucleotide
tctacatctaaccc

SEQ ID NO: 1055 - DNA, 14 bp, Artificial sequence
  Synthetic oligonucleotide
gtctacatctaacc

SEQ ID NO: 1056 - DNA, 14 bp, Artificial sequence
  Synthetic oligonucleotide
agtctacatctaac

SEQ ID NO: 1057 - DNA, 14 bp, Artificial sequence
  Synthetic oligonucleotide
cagtctacatctaa

SEQ ID NO: 1058 - DNA, 14 bp, Artificial sequence
  Synthetic oligonucleotide
tcagtctacatcta

SEQ ID NO: 1059 - DNA, 14 bp, Artificial sequence
  Synthetic oligonucleotide
ttcagtctacatct

SEQ ID NO: 1060 - DNA, 14 bp, Artificial sequence
  Synthetic oligonucleotide
taaccacacctcct

SEQ ID NO: 1061 - DNA, 14 bp, Artificial sequence
  Synthetic oligonucleotide
ttaaccacacctcc

SEQ ID NO: 1062 - DNA, 14 bp, Artificial sequence
  Synthetic oligonucleotide
tttaaccacacctc

SEQ ID NO: 1063 - DNA, 14 bp, Artificial sequence
  Synthetic oligonucleotide
ttttaaccacacct

SEQ ID NO: 1064 - DNA, 14 bp, Artificial sequence
  Synthetic oligonucleotide
gttttaaccacacc

SEQ ID NO: 1065 - DNA, 14 bp, Artificial sequence
  Synthetic oligonucleotide
agttttaaccacac

SEQ ID NO: 1066 - DNA, 14 bp, Artificial sequence
  Synthetic oligonucleotide
caacaaaacatcaa

SEQ ID NO: 1067 - DNA, 14 bp, Artificial sequence
  Synthetic oligonucleotide
tcaacaaaacatca

SEQ ID NO: 1068 - DNA, 14 bp, Artificial sequence
  Synthetic oligonucleotide
ttcaacaaaacatc

SEQ ID NO: 1069 - DNA, 14 bp, Artificial sequence
  Synthetic oligonucleotide
tttcaacaaaacat

SEQ ID NO: 1070 - DNA, 14 bp, Artificial sequence
  Synthetic oligonucleotide
ttttcaacaaaaca

SEQ ID NO: 1071 - DNA, 14 bp, Artificial sequence
  Synthetic oligonucleotide
gttttcaacaaaac

SEQ ID NO: 1072 - DNA, 14 bp, Artificial sequence
  Synthetic oligonucleotide
tgttttcaacaaaa

SEQ ID NO: 1073 - DNA, 14 bp, Artificial sequence
  Synthetic oligonucleotide
ttctaaaacttacc

SEQ ID NO: 1074 - DNA, 14 bp, Artificial sequence
  Synthetic oligonucleotide
tttctaaaacttac

SEQ ID NO: 1075 - DNA, 14 bp, Artificial sequence
  Synthetic oligonucleotide
ctttctaaaactta

SEQ ID NO: 1076 - DNA, 14 bp, Artificial sequence
  Synthetic oligonucleotide
tctttctaaaactt

SEQ ID NO: 1077 - DNA, 14 bp, Artificial sequence
  Synthetic oligonucleotide
atctttctaaaact

SEQ ID NO: 1078 - DNA, 14 bp, Artificial sequence
  Synthetic oligonucleotide
aatctttctaaaac

SEQ ID NO: 1079 - DNA, 14 bp, Artificial sequence
  Synthetic oligonucleotide
gaatctttctaaaa

SEQ ID NO: 1080 - DNA, 14 bp, Artificial sequence
  Synthetic oligonucleotide
agaatctttctaaa

SEQ ID NO: 1081 - DNA, 14 bp, Artificial sequence
  Synthetic oligonucleotide
cagaatctttctaa

SEQ ID NO: 1082 - DNA, 14 bp, Artificial sequence
  Synthetic oligonucleotide
cctttatttccctt

SEQ ID NO: 1083 - DNA, 14 bp, Artificial sequence
  Synthetic oligonucleotide
ccctttatttccct

SEQ ID NO: 1084 - DNA, 14 bp, Artificial sequence
  Synthetic oligonucleotide
tccctttatttccc

SEQ ID NO: 1085 - DNA, 14 bp, Artificial sequence
  Synthetic oligonucleotide
ttccctttatttcc

SEQ ID NO: 1086 - DNA, 14 bp, Artificial sequence
  Synthetic oligonucleotide
tttccctttatttc

SEQ ID NO: 1087 - DNA, 14 bp, Artificial sequence
  Synthetic oligonucleotide
atttccctttattt

SEQ ID NO: 1088 - DNA, 14 bp, Artificial sequence
  Synthetic oligonucleotide
tatttccctttatt

SEQ ID NO: 1089 - DNA, 14 bp, Artificial sequence
  Synthetic oligonucleotide
gtatttccctttat

SEQ ID NO: 1090 - DNA, 27 bp, Artificial
  Probe
ctgaacagcctccttggtcttcttgta

SEQ ID NO: 1091 - DNA, 21 bp, artificial
  Primer
cttgccagctctcattctctg

SEQ ID NO: 1092 - DNA, 21 bp, Artificial
  Primer
tggtggttgaagataaggttg

SEQ ID NO: 1093 - DNA, 17 bp, Homo sapiens
aagagtaaaatatgggt

SEQ ID NO: 1094 - DNA, 18 bp, Homo sapiens
gaatgtaaaagtgtacag

SEQ ID NO: 1095 - DNA, 18 bp, Homo sapiens
ggaatgtaaaagtgtaca

SEQ ID NO: 1096 - DNA, 18 bp, Homo sapiens
gggaatgtaaaagtgtac

SEQ ID NO: 1097 - DNA, 19 bp, Homo sapiens
ttgatggtataatgaagaa

SEQ ID NO: 1098 - DNA, 19 bp, Homo sapiens
ggaagatgtaaataagatt

SEQ ID NO: 1099 - DNA, 18 bp, Artificial sequence
  Synthetic oligonucleotide
ccaaaagaaaccaaaccc

SEQ ID NO: 1100 - DNA, 19 bp, Artificial sequence
  Synthetic oligonucleotide
ccccattcaaatatttatt

SEQ ID NO: 1101 - DNA, 17 bp, Artificial sequence
  Synthetic oligonucleotide
aatcatttacccccaac

SEQ ID NO: 1102 - DNA, 18 bp, Artificial sequence
  Synthetic oligonucleotide
tatctcaaactatcccca

SEQ ID NO: 1103 - DNA, 18 bp, Artificial sequence
  Synthetic oligonucleotide
tctattccttaacccaac

SEQ ID NO: 1104 - DNA, 20 bp, Artificial sequence
  Synthetic oligonucleotide
tcccctaaataatttaatca

SEQ ID NO: 1105 - DNA, 17 bp, Artificial sequence
  Synthetic oligonucleotide
aaaccactccattccaa

SEQ ID NO: 1106 - DNA, 19 bp, Artificial sequence
  Synthetic oligonucleotide
tctaaaccccaaactttca

SEQ ID NO: 1107 - DNA, 19 bp, Artificial sequence
  Synthetic oligonucleotide
ttctaaaccccaaactttc

SEQ ID NO: 1108 - DNA, 18 bp, Artificial sequence
  Synthetic oligonucleotide
agttctaaaccccaaact

SEQ ID NO: 1109 - DNA, 19 bp, Artificial sequence
  Synthetic oligonucleotide
tgaaaccattactacaacc

SEQ ID NO: 1110 - DNA, 20 bp, Artificial sequence
  Synthetic oligonucleotide
acatcatttatcactaccac

SEQ ID NO: 1111 - DNA, 17 bp, Artificial sequence
  Synthetic oligonucleotide
aacattaaaccctccca

SEQ ID NO: 1112 - DNA, 18 bp, Artificial sequence
  Synthetic oligonucleotide
tcagatcctaaaatcact

SEQ ID NO: 1113 - DNA, 19 bp, Artificial sequence
  Synthetic oligonucleotide
ctatacctaaaacaatcta

SEQ ID NO: 1114 - DNA, 18 bp, Artificial sequence
  Synthetic oligonucleotide
tgattcttatacttacta

SEQ ID NO: 1115 - DNA, 20 bp, Artificial sequence
  Synthetic oligonucleotide
taaaaatataactactccta

SEQ ID NO: 1116 - DNA, 20 bp, Artificial sequence
  Synthetic oligonucleotide
tcttcattataccatcaaat

SEQ ID NO: 1117 - DNA, 18 bp, Artificial sequence
  Synthetic oligonucleotide
gtttcatatttttaatcc

SEQ ID NO: 1118 - DNA, 20 bp, Artificial sequence
  Synthetic oligonucleotide
taatatcctcattacccatt

SEQ ID NO: 1119 - DNA, 19 bp, Artificial sequence
  Synthetic oligonucleotide
caaatattcacaaatccta

SEQ ID NO: 1120 - DNA, 20 bp, Artificial sequence
  Synthetic oligonucleotide
catcacaaaataacctatca

SEQ ID NO: 1121 - DNA, 20 bp, Artificial sequence
  Synthetic oligonucleotide
ctctcaacttctactactaa

SEQ ID NO: 1122 - DNA, 19 bp, Artificial sequence
  Synthetic oligonucleotide
aatcttatttacatcttcc

SEQ ID NO: 1123 - DNA, 20 bp, Artificial sequence
  Synthetic oligonucleotide
ccaaaattacttcttttatc

SEQ ID NO: 1124 - DNA, 18 bp, Artificial sequence
  Synthetic oligonucleotide
aacccaactttctatttt

SEQ ID NO: 1125 - DNA, 19 bp, Artificial sequence
  Synthetic oligonucleotide
acaatatattcctcaatca

SEQ ID NO: 1126 - DNA, 17 bp, Artificial sequence
  Synthetic oligonucleotide
cctgtaacaattataca

SEQ ID NO: 1127 - DNA, 17 bp, Artificial sequence
  Synthetic oligonucleotide
catccctttaccacttt

SEQ ID NO: 1128 - DNA, 23 bp, artificial
  Primer
gtttctaaagacatggtcacagc

SEQ ID NO: 1129 - DNA, 23 bp, artificial
  Primer
ctatcaggacagagttcacatcc

SEQ ID NO: 1130 - DNA, 22 bp, artificial
  FAM labelled probe
aaaggccagccaccagttcagg

SEQ ID NO: 1131 - DNA, 25 bp, artificial
  FAM labelled probe
tgatctttgcagtgacccagcatca

SEQ ID NO: 1132 - DNA, 20 bp, artificial
  Primer
gctgtttaacttcgcttccg

SEQ ID NO: 1133 - DNA, 21 bp, artificial
  Primer
cagcaacttcctcaattcctt

SEQ ID NO: 1134 - DNA, 24 bp, artificial
  FAM lebelled probe
ctccgcagggctattcagctaagt

SEQ ID NO: 1135 - DNA, 25 bp, artificial
  Primer
agtaagatttgtacctgatgtctgt

SEQ ID NO: 1136 - DNA, 22 bp, artificial
  Primer
catggaagatgaggaagcagat

SEQ ID NO: 1137 - DNA, 17 bp, Artificial sequence
  Synthetic oligonucleotide
cctacttcacttcctaa

SEQ ID NO: 1138 - DNA, 19 bp, Artificial sequence
  Synthetic oligonucleotide
tttcctacttcacttccta

SEQ ID NO: 1139 - DNA, 18 bp, Artificial sequence
  Synthetic oligonucleotide
ttcctacttcacttccta

SEQ ID NO: 1140 - DNA, 18 bp, Artificial sequence
  Synthetic oligonucleotide
tttcctacttcacttcct

SEQ ID NO: 1141 - DNA, 17 bp, Artificial sequence
  Synthetic oligonucleotide
tttcctacttcacttcc

SEQ ID NO: 1142 - DNA, 17 bp, Artificial sequence
  Synthetic oligonucleotide
gtttcctacttcacttc

SEQ ID NO: 1143 - DNA, 18 bp, Artificial sequence
  Synthetic oligonucleotide
accaaacccaaacatccc

SEQ ID NO: 1144 - DNA, 20 bp, Artificial sequence
  Synthetic oligonucleotide
agaaaccaaacccaaacatc

SEQ ID NO: 1145 - DNA, 19 bp, Artificial sequence
  Synthetic oligonucleotide
agaaaccaaacccaaacat

SEQ ID NO: 1146 - DNA, 21 bp, Artificial sequence
  Synthetic oligonucleotide
ctcctaatacctaaaaacaaa

SEQ ID NO: 1147 - DNA, 19 bp, Artificial sequence
  Synthetic oligonucleotide
ctcctaatacctaaaaaca

SEQ ID NO: 1148 - DNA, 20 bp, Artificial sequence
  Synthetic oligonucleotide
actcctaatacctaaaaaca

SEQ ID NO: 1149 - DNA, 21 bp, Artificial sequence
  Synthetic oligonucleotide
cactcctaatacctaaaaaca

SEQ ID NO: 1150 - DNA, 20 bp, Artificial sequence
  Synthetic oligonucleotide
ccactcctaatacctaaaaa

SEQ ID NO: 1151 - DNA, 21 bp, Artificial sequence
  Synthetic oligonucleotide
tccactcctaatacctaaaaa

SEQ ID NO: 1152 - DNA, 19 bp, Artificial sequence
  Synthetic oligonucleotide
ccactcctaatacctaaaa

SEQ ID NO: 1153 - DNA, 20 bp, Artificial sequence
  Synthetic oligonucleotide
tccactcctaatacctaaaa

SEQ ID NO: 1154 - DNA, 18 bp, Artificial sequence
  Synthetic oligonucleotide
ccactcctaatacctaaa

SEQ ID NO: 1155 - DNA, 20 bp, Artificial sequence
  Synthetic oligonucleotide
gtccactcctaatacctaaa

SEQ ID NO: 1156 - DNA, 17 bp, Artificial sequence
  Synthetic oligonucleotide
ccactcctaatacctaa

SEQ ID NO: 1157 - DNA, 18 bp, Artificial sequence
  Synthetic oligonucleotide
tccactcctaatacctaa

SEQ ID NO: 1158 - DNA, 19 bp, Artificial sequence
  Synthetic oligonucleotide
gtccactcctaatacctaa

SEQ ID NO: 1159 - DNA, 19 bp, Artificial sequence
  Synthetic oligonucleotide
agtccactcctaataccta

SEQ ID NO: 1160 - DNA, 17 bp, Artificial sequence
  Synthetic oligonucleotide
tccactcctaataccta

SEQ ID NO: 1161 - DNA, 18 bp, Artificial sequence
  Synthetic oligonucleotide
agtccactcctaatacct

SEQ ID NO: 1162 - DNA, 16 bp, Artificial sequence
  Synthetic oligonucleotide
gtccactcctaatacc

SEQ ID NO: 1163 - DNA, 17 bp, Artificial sequence
  Synthetic oligonucleotide
agtccactcctaatacc

SEQ ID NO: 1164 - DNA, 18 bp, Artificial sequence
  Synthetic oligonucleotide
cagtccactcctaatacc

SEQ ID NO: 1165 - DNA, 18 bp, Artificial sequence
  Synthetic oligonucleotide
ccagtccactcctaatac

SEQ ID NO: 1166 - DNA, 17 bp, Artificial sequence
  Synthetic oligonucleotide
cagtccactcctaatac

SEQ ID NO: 1167 - DNA, 16 bp, Artificial sequence
  Synthetic oligonucleotide
agtccactcctaatac

SEQ ID NO: 1168 - DNA, 16 bp, Artificial sequence
  Synthetic oligonucleotide
cagtccactcctaata

SEQ ID NO: 1169 - DNA, 17 bp, Artificial sequence
  Synthetic oligonucleotide
ccagtccactcctaata

SEQ ID NO: 1170 - DNA, 17 bp, Artificial sequence
  Synthetic oligonucleotide
gcaactctttccaaaca

SEQ ID NO: 1171 - DNA, 18 bp, Artificial sequence
  Synthetic oligonucleotide
agcaactctttccaaaca

SEQ ID NO: 1172 - DNA, 19 bp, Artificial sequence
  Synthetic oligonucleotide
cagcaactctttccaaaca

SEQ ID NO: 1173 - DNA, 18 bp, Artificial sequence
  Synthetic oligonucleotide
ccagcaactctttccaaa

SEQ ID NO: 1174 - DNA, 17 bp, Artificial sequence
  Synthetic oligonucleotide
ccagcaactctttccaa

SEQ ID NO: 1175 - DNA, 18 bp, Artificial sequence
  Synthetic oligonucleotide
accagcaactctttccaa

SEQ ID NO: 1176 - DNA, 17 bp, Artificial sequence
  Synthetic oligonucleotide
ttaccagcaactctttc

SEQ ID NO: 1177 - DNA, 19 bp, Artificial sequence
  Synthetic oligonucleotide
tgctcctcctattaaataa

SEQ ID NO: 1178 - DNA, 18 bp, Artificial sequence
  Synthetic oligonucleotide
gctcctcctattaaataa

SEQ ID NO: 1179 - DNA, 17 bp, Artificial sequence
  Synthetic oligonucleotide
gctcctcctattaaata

SEQ ID NO: 1180 - DNA, 18 bp, Artificial sequence
  Synthetic oligonucleotide
tgctcctcctattaaata

SEQ ID NO: 1181 - DNA, 17 bp, Artificial sequence
  Synthetic oligonucleotide
tgctcctcctattaaat

SEQ ID NO: 1182 - DNA, 18 bp, Artificial sequence
  Synthetic oligonucleotide
ttgctcctcctattaaat

SEQ ID NO: 1183 - DNA, 21 bp, Artificial sequence
  Synthetic oligonucleotide
atttaataaaacaaaaaccct

SEQ ID NO: 1184 - DNA, 17 bp, Artificial sequence
  Synthetic oligonucleotide
gcccaaaaaactaaatt

SEQ ID NO: 1185 - DNA, 18 bp, Artificial sequence
  Synthetic oligonucleotide
gtttttacattctaactt

SEQ ID NO: 1186 - DNA, 18 bp, Artificial sequence
  Synthetic oligonucleotide
tgtttttacattctaact

SEQ ID NO: 1187 - DNA, 18 bp, Artificial sequence
  Synthetic oligonucleotide
ctgtttttacattctaac

SEQ ID NO: 1188 - DNA, 18 bp, Artificial sequence
  Synthetic oligonucleotide
ccccattcaaatatttat

SEQ ID NO: 1189 - DNA, 19 bp, Artificial sequence
  Synthetic oligonucleotide
gccccattcaaatatttat

SEQ ID NO: 1190 - DNA, 18 bp, Artificial sequence
  Synthetic oligonucleotide
gccccattcaaatattta

SEQ ID NO: 1191 - DNA, 21 bp, Artificial sequence
  Synthetic oligonucleotide
ccattcaaatatatacatttt

SEQ ID NO: 1192 - DNA, 21 bp, Artificial sequence
  Synthetic oligonucleotide
tccattcaaatatatacattt

SEQ ID NO: 1193 - DNA, 21 bp, Artificial sequence
  Synthetic oligonucleotide
atccattcaaatatatacatt

SEQ ID NO: 1194 - DNA, 20 bp, Artificial sequence
  Synthetic oligonucleotide
tccattcaaatatatacatt

SEQ ID NO: 1195 - DNA, 21 bp, Artificial sequence
  Synthetic oligonucleotide
tatccattcaaatatatacat

SEQ ID NO: 1196 - DNA, 19 bp, Artificial sequence
  Synthetic oligonucleotide
tccattcaaatatatacat

SEQ ID NO: 1197 - DNA, 19 bp, Artificial sequence
  Synthetic oligonucleotide
atccattcaaatatataca

SEQ ID NO: 1198 - DNA, 21 bp, Artificial sequence
  Synthetic oligonucleotide
ttatccattcaaatatataca

SEQ ID NO: 1199 - DNA, 18 bp, Artificial sequence
  Synthetic oligonucleotide
tccattcaaatatataca

SEQ ID NO: 1200 - DNA, 20 bp, Artificial sequence
  Synthetic oligonucleotide
tatccattcaaatatataca

SEQ ID NO: 1201 - DNA, 21 bp, Artificial sequence
  Synthetic oligonucleotide
ctttatccattcaaatatata

SEQ ID NO: 1202 - DNA, 21 bp, Artificial sequence
  Synthetic oligonucleotide
tctttatccattcaaatatat

SEQ ID NO: 1203 - DNA, 21 bp, Artificial sequence
  Synthetic oligonucleotide
ctctttatccattcaaatata

SEQ ID NO: 1204 - DNA, 20 bp, Artificial sequence
  Synthetic oligonucleotide
tctttatccattcaaatata

SEQ ID NO: 1205 - DNA, 19 bp, Artificial sequence
  Synthetic oligonucleotide
ctttatccattcaaatata

SEQ ID NO: 1206 - DNA, 21 bp, Artificial sequence
  Synthetic oligonucleotide
tctctttatccattcaaatat

SEQ ID NO: 1207 - DNA, 20 bp, Artificial sequence
  Synthetic oligonucleotide
ctctttatccattcaaatat

SEQ ID NO: 1208 - DNA, 19 bp, Artificial sequence
  Synthetic oligonucleotide
tctttatccattcaaatat

SEQ ID NO: 1209 - DNA, 20 bp, Artificial sequence
  Synthetic oligonucleotide
tctctttatccattcaaata

SEQ ID NO: 1210 - DNA, 19 bp, Artificial sequence
  Synthetic oligonucleotide
ctctttatccattcaaata

SEQ ID NO: 1211 - DNA, 19 bp, Artificial sequence
  Synthetic oligonucleotide
tctctttatccattcaaat

SEQ ID NO: 1212 - DNA, 18 bp, Artificial sequence
  Synthetic oligonucleotide
tctctttatccattcaaa

SEQ ID NO: 1213 - DNA, 18 bp, Artificial sequence
  Synthetic oligonucleotide
agcaccatatatatctca

SEQ ID NO: 1214 - DNA, 17 bp, Artificial sequence
  Synthetic oligonucleotide
gcaccatatatatctca

SEQ ID NO: 1215 - DNA, 19 bp, Artificial sequence
  Synthetic oligonucleotide
cagcaccatatatatctca

SEQ ID NO: 1216 - DNA, 17 bp, Artificial sequence
  Synthetic oligonucleotide
agcaccatatatatctc

SEQ ID NO: 1217 - DNA, 16 bp, Artificial sequence
  Synthetic oligonucleotide
gcaccatatatatctc

SEQ ID NO: 1218 - DNA, 18 bp, Artificial sequence
  Synthetic oligonucleotide
cagcaccatatatatctc

SEQ ID NO: 1219 - DNA, 17 bp, Artificial sequence
  Synthetic oligonucleotide
cagcaccatatatatct

SEQ ID NO: 1220 - DNA, 18 bp, Artificial sequence
  Synthetic oligonucleotide
acagcaccatatatatct

SEQ ID NO: 1221 - DNA, 17 bp, Artificial sequence
  Synthetic oligonucleotide
acagcaccatatatatc

SEQ ID NO: 1222 - DNA, 17 bp, Artificial sequence
  Synthetic oligonucleotide
ctatgttattatcccca

SEQ ID NO: 1223 - DNA, 17 bp, Artificial sequence
  Synthetic oligonucleotide
tctatgttattatcccc

SEQ ID NO: 1224 - DNA, 17 bp, Artificial sequence
  Synthetic oligonucleotide
ctctacactctaactct

SEQ ID NO: 1225 - DNA, 18 bp, Artificial sequence
  Synthetic oligonucleotide
tctctacactctaactct

SEQ ID NO: 1226 - DNA, 19 bp, Artificial sequence
  Synthetic oligonucleotide
ttctctacactctaactct

SEQ ID NO: 1227 - DNA, 20 bp, Artificial sequence
  Synthetic oligonucleotide
cttctctacactctaactct

SEQ ID NO: 1228 - DNA, 18 bp, Artificial sequence
  Synthetic oligonucleotide
ttctctacactctaactc

SEQ ID NO: 1229 - DNA, 19 bp, Artificial sequence
  Synthetic oligonucleotide
cttctctacactctaactc

SEQ ID NO: 1230 - DNA, 17 bp, Artificial sequence
  Synthetic oligonucleotide
tctctacactctaactc

SEQ ID NO: 1231 - DNA, 20 bp, Artificial sequence
  Synthetic oligonucleotide
ccttctctacactctaactc

SEQ ID NO: 1232 - DNA, 17 bp, Artificial sequence
  Synthetic oligonucleotide
ttctctacactctaact

SEQ ID NO: 1233 - DNA, 18 bp, Artificial sequence
  Synthetic oligonucleotide
cttctctacactctaact

SEQ ID NO: 1234 - DNA, 19 bp, Artificial sequence
  Synthetic oligonucleotide
ccttctctacactctaact

SEQ ID NO: 1235 - DNA, 18 bp, Artificial sequence
  Synthetic oligonucleotide
ccttctctacactctaac

SEQ ID NO: 1236 - DNA, 17 bp, Artificial sequence
  Synthetic oligonucleotide
cttctctacactctaac

SEQ ID NO: 1237 - DNA, 19 bp, Artificial sequence
  Synthetic oligonucleotide
agccttctctacactctaa

SEQ ID NO: 1238 - DNA, 17 bp, Artificial sequence
  Synthetic oligonucleotide
ccttctctacactctaa

SEQ ID NO: 1239 - DNA, 18 bp, Artificial sequence
  Synthetic oligonucleotide
gccttctctacactctaa

SEQ ID NO: 1240 - DNA, 18 bp, Artificial sequence
  Synthetic oligonucleotide
agccttctctacactcta

SEQ ID NO: 1241 - DNA, 21 bp, Artificial sequence
  Synthetic oligonucleotide
tactaactacaacacaaatca

SEQ ID NO: 1242 - DNA, 21 bp, Artificial sequence
  Synthetic oligonucleotide
ctactaactacaacacaaatc

SEQ ID NO: 1243 - DNA, 21 bp, Artificial sequence
  Synthetic oligonucleotide
cactactaactacaacacaaa

SEQ ID NO: 1244 - DNA, 20 bp, Artificial sequence
  Synthetic oligonucleotide
cactactaactacaacacaa

SEQ ID NO: 1245 - DNA, 21 bp, Artificial sequence
  Synthetic oligonucleotide
acactactaactacaacacaa

SEQ ID NO: 1246 - DNA, 19 bp, Artificial sequence
  Synthetic oligonucleotide
cactactaactacaacaca

SEQ ID NO: 1247 - DNA, 20 bp, Artificial sequence
  Synthetic oligonucleotide
acactactaactacaacaca

SEQ ID NO: 1248 - DNA, 20 bp, Artificial sequence
  Synthetic oligonucleotide
gacactactaactacaacac

SEQ ID NO: 1249 - DNA, 19 bp, Artificial sequence
  Synthetic oligonucleotide
gacactactaactacaaca

SEQ ID NO: 1250 - DNA, 18 bp, Artificial sequence
  Synthetic oligonucleotide
agacactactaactacaa

SEQ ID NO: 1251 - DNA, 17 bp, Artificial sequence
  Synthetic oligonucleotide
agacactactaactaca

SEQ ID NO: 1252 - DNA, 18 bp, Artificial sequence
  Synthetic oligonucleotide
atcatttacccccaacct

SEQ ID NO: 1253 - DNA, 17 bp, Artificial sequence
  Synthetic oligonucleotide
atcatttacccccaacc

SEQ ID NO: 1254 - DNA, 18 bp, Artificial sequence
  Synthetic oligonucleotide
caaatcatttacccccaa

SEQ ID NO: 1255 - DNA, 19 bp, Artificial sequence
  Synthetic oligonucleotide
ccaaatcatttacccccaa

SEQ ID NO: 1256 - DNA, 19 bp, Artificial sequence
  Synthetic oligonucleotide
accaaatcatttaccccca

SEQ ID NO: 1257 - DNA, 19 bp, Artificial sequence
  Synthetic oligonucleotide
taccaaatcatttaccccc

SEQ ID NO: 1258 - DNA, 17 bp, Artificial sequence
  Synthetic oligonucleotide
accaaatcatttacccc

SEQ ID NO: 1259 - DNA, 18 bp, Artificial sequence
  Synthetic oligonucleotide
taccaaatcatttacccc

SEQ ID NO: 1260 - DNA, 19 bp, Artificial sequence
  Synthetic oligonucleotide
ctaccaaatcatttacccc

SEQ ID NO: 1261 - DNA, 17 bp, Artificial sequence
  Synthetic oligonucleotide
taccaaatcatttaccc

SEQ ID NO: 1262 - DNA, 17 bp, Artificial sequence
  Synthetic oligonucleotide
ctaccaaatcatttacc

SEQ ID NO: 1263 - DNA, 19 bp, Artificial sequence
  Synthetic oligonucleotide
tgctaccaaatcatttacc

SEQ ID NO: 1264 - DNA, 18 bp, Artificial sequence
  Synthetic oligonucleotide
gctaccaaatcatttacc

SEQ ID NO: 1265 - DNA, 18 bp, Artificial sequence
  Synthetic oligonucleotide
tgctaccaaatcatttac

SEQ ID NO: 1266 - DNA, 17 bp, Artificial sequence
  Synthetic oligonucleotide
gctaccaaatcatttac

SEQ ID NO: 1267 - DNA, 17 bp, Artificial sequence
  Synthetic oligonucleotide
tgctaccaaatcattta

SEQ ID NO: 1268 - DNA, 18 bp, Artificial sequence
  Synthetic oligonucleotide
ctgctaccaaatcattta

SEQ ID NO: 1269 - DNA, 18 bp, Artificial sequence
  Synthetic oligonucleotide
actgctaccaaatcattt

SEQ ID NO: 1270 - DNA, 17 bp, Artificial sequence
  Synthetic oligonucleotide
ctgctaccaaatcattt

SEQ ID NO: 1271 - DNA, 17 bp, Artificial sequence
  Synthetic oligonucleotide
actgctaccaaatcatt

SEQ ID NO: 1272 - DNA, 17 bp, Artificial sequence
  Synthetic oligonucleotide
cactttgccataatcaa

SEQ ID NO: 1273 - DNA, 19 bp, Artificial sequence
  Synthetic oligonucleotide
ttatctcaaactatcccca

SEQ ID NO: 1274 - DNA, 17 bp, Artificial sequence
  Synthetic oligonucleotide
atctcaaactatcccca

SEQ ID NO: 1275 - DNA, 20 bp, Artificial sequence
  Synthetic oligonucleotide
cttatctcaaactatcccca

SEQ ID NO: 1276 - DNA, 17 bp, Artificial sequence
  Synthetic oligonucleotide
tatctcaaactatcccc

SEQ ID NO: 1277 - DNA, 19 bp, Artificial sequence
  Synthetic oligonucleotide
cttatctcaaactatcccc

SEQ ID NO: 1278 - DNA, 18 bp, Artificial sequence
  Synthetic oligonucleotide
ttatctcaaactatcccc

SEQ ID NO: 1279 - DNA, 18 bp, Artificial sequence
  Synthetic oligonucleotide
cttatctcaaactatccc

SEQ ID NO: 1280 - DNA, 19 bp, Artificial sequence
  Synthetic oligonucleotide
ccttatctcaaactatccc

SEQ ID NO: 1281 - DNA, 17 bp, Artificial sequence
  Synthetic oligonucleotide
ttatctcaaactatccc

SEQ ID NO: 1282 - DNA, 17 bp, Artificial sequence
  Synthetic oligonucleotide
cttatctcaaactatcc

SEQ ID NO: 1283 - DNA, 19 bp, Artificial sequence
  Synthetic oligonucleotide
cccttatctcaaactatcc

SEQ ID NO: 1284 - DNA, 18 bp, Artificial sequence
  Synthetic oligonucleotide
ccttatctcaaactatcc

SEQ ID NO: 1285 - DNA, 17 bp, Artificial sequence
  Synthetic oligonucleotide
ccttatctcaaactatc

SEQ ID NO: 1286 - DNA, 19 bp, Artificial sequence
  Synthetic oligonucleotide
gcccttatctcaaactatc

SEQ ID NO: 1287 - DNA, 18 bp, Artificial sequence
  Synthetic oligonucleotide
cccttatctcaaactatc

SEQ ID NO: 1288 - DNA, 19 bp, Artificial sequence
  Synthetic oligonucleotide
tgcccttatctcaaactat

SEQ ID NO: 1289 - DNA, 18 bp, Artificial sequence
  Synthetic oligonucleotide
gcccttatctcaaactat

SEQ ID NO: 1290 - DNA, 17 bp, Artificial sequence
  Synthetic oligonucleotide
cccttatctcaaactat

SEQ ID NO: 1291 - DNA, 17 bp, Artificial sequence
  Synthetic oligonucleotide
gcccttatctcaaacta

SEQ ID NO: 1292 - DNA, 18 bp, Artificial sequence
  Synthetic oligonucleotide
tgcccttatctcaaacta

SEQ ID NO: 1293 - DNA, 17 bp, Artificial sequence
  Synthetic oligonucleotide
tgcccttatctcaaact

SEQ ID NO: 1294 - DNA, 17 bp, Artificial sequence
  Synthetic oligonucleotide
ttgcccttatctcaaac

SEQ ID NO: 1295 - DNA, 16 bp, Artificial sequence
  Synthetic oligonucleotide
cttgcccttatctcaa

SEQ ID NO: 1296 - DNA, 18 bp, Artificial sequence
  Synthetic oligonucleotide
tgaaatcaaacttcatca

SEQ ID NO: 1297 - DNA, 16 bp, Artificial sequence
  Synthetic oligonucleotide
ggtcaccatacttaat

SEQ ID NO: 1298 - DNA, 18 bp, Artificial sequence
  Synthetic oligonucleotide
tgctaacacaaatttcct

SEQ ID NO: 1299 - DNA, 17 bp, Artificial sequence
  Synthetic oligonucleotide
gctaacacaaatttcct

SEQ ID NO: 1300 - DNA, 18 bp, Artificial sequence
  Synthetic oligonucleotide
ttgctaacacaaatttcc

SEQ ID NO: 1301 - DNA, 17 bp, Artificial sequence
  Synthetic oligonucleotide
tgctaacacaaatttcc

SEQ ID NO: 1302 - DNA, 17 bp, Artificial sequence
  Synthetic oligonucleotide
ttgctaacacaaatttc

SEQ ID NO: 1303 - DNA, 17 bp, Artificial sequence
  Synthetic oligonucleotide
cctttgctaacacaaat

SEQ ID NO: 1304 - DNA, 19 bp, Artificial sequence
  Synthetic oligonucleotide
gtataaccaataataacta

SEQ ID NO: 1305 - DNA, 18 bp, Artificial sequence
  Synthetic oligonucleotide
tctgacatcacacaattt

SEQ ID NO: 1306 - DNA, 17 bp, Artificial sequence
  Synthetic oligonucleotide
tctgacatcacacaatt

SEQ ID NO: 1307 - DNA, 17 bp, Artificial sequence
  Synthetic oligonucleotide
tatctgacatcacacaa

SEQ ID NO: 1308 - DNA, 17 bp, Artificial sequence
  Synthetic oligonucleotide
ctattccttaacccaac

SEQ ID NO: 1309 - DNA, 19 bp, Artificial sequence
  Synthetic oligonucleotide
gtctattccttaacccaac

SEQ ID NO: 1310 - DNA, 18 bp, Artificial sequence
  Synthetic oligonucleotide
gtctattccttaacccaa

SEQ ID NO: 1311 - DNA, 17 bp, Artificial sequence
  Synthetic oligonucleotide
tctattccttaacccaa

SEQ ID NO: 1312 - DNA, 17 bp, Artificial sequence
  Synthetic oligonucleotide
gtctattccttaaccca

SEQ ID NO: 1313 - DNA, 16 bp, Artificial sequence
  Synthetic oligonucleotide
gtctattccttaaccc

SEQ ID NO: 1314 - DNA, 16 bp, Artificial sequence
  Synthetic oligonucleotide
ggtctattccttaacc

SEQ ID NO: 1315 - DNA, 18 bp, Artificial sequence
  Synthetic oligonucleotide
agaacatttccttctcct

SEQ ID NO: 1316 - DNA, 17 bp, Artificial sequence
  Synthetic oligonucleotide
aactgtcccaaacaacc

SEQ ID NO: 1317 - DNA, 18 bp, Artificial sequence
  Synthetic oligonucleotide
ttagtctccctcattttc

SEQ ID NO: 1318 - DNA, 17 bp, Artificial sequence
  Synthetic oligonucleotide
atttagtctccctcatt

SEQ ID NO: 1319 - DNA, 17 bp, Artificial sequence
  Synthetic oligonucleotide
atgcatcaaatctcata

SEQ ID NO: 1320 - DNA, 21 bp, Artificial sequence
  Synthetic oligonucleotide
cctaaataatttaatcattaa

SEQ ID NO: 1321 - DNA, 21 bp, Artificial sequence
  Synthetic oligonucleotide
ccctaaataatttaatcatta

SEQ ID NO: 1322 - DNA, 21 bp, Artificial sequence
  Synthetic oligonucleotide
cccctaaataatttaatcatt

SEQ ID NO: 1323 - DNA, 20 bp, Artificial sequence
  Synthetic oligonucleotide
ccctaaataatttaatcatt

SEQ ID NO: 1324 - DNA, 19 bp, Artificial sequence
  Synthetic oligonucleotide
ccctaaataatttaatcat

SEQ ID NO: 1325 - DNA, 19 bp, Artificial sequence
  Synthetic oligonucleotide
cccctaaataatttaatca

SEQ ID NO: 1326 - DNA, 18 bp, Artificial sequence
  Synthetic oligonucleotide
ccctaaataatttaatca

SEQ ID NO: 1327 - DNA, 18 bp, Artificial sequence
  Synthetic oligonucleotide
cccctaaataatttaatc

SEQ ID NO: 1328 - DNA, 19 bp, Artificial sequence
  Synthetic oligonucleotide
tcccctaaataatttaatc

SEQ ID NO: 1329 - DNA, 18 bp, Artificial sequence
  Synthetic oligonucleotide
ttgctaatatttccaaaa

SEQ ID NO: 1330 - DNA, 17 bp, Artificial sequence
  Synthetic oligonucleotide
cttgctaatatttccaa

SEQ ID NO: 1331 - DNA, 18 bp, Artificial sequence
  Synthetic oligonucleotide
actgtcatccatatttcc

SEQ ID NO: 1332 - DNA, 17 bp, Artificial sequence
  Synthetic oligonucleotide
actgtcatccatatttc

SEQ ID NO: 1333 - DNA, 18 bp, Artificial sequence
  Synthetic oligonucleotide
aatgccccactctaatat

SEQ ID NO: 1334 - DNA, 16 bp, Artificial sequence
  Synthetic oligonucleotide
tgccccactctaatat

SEQ ID NO: 1335 - DNA, 17 bp, Artificial sequence
  Synthetic oligonucleotide
atgccccactctaatat

SEQ ID NO: 1336 - DNA, 18 bp, Artificial sequence
  Synthetic oligonucleotide
aaatgccccactctaata

SEQ ID NO: 1337 - DNA, 16 bp, Artificial sequence
  Synthetic oligonucleotide
atgccccactctaata

SEQ ID NO: 1338 - DNA, 17 bp, Artificial sequence
  Synthetic oligonucleotide
aatgccccactctaata

SEQ ID NO: 1339 - DNA, 17 bp, Artificial sequence
  Synthetic oligonucleotide
ttaaatgccccactcta

SEQ ID NO: 1340 - DNA, 18 bp, Artificial sequence
  Synthetic oligonucleotide
tctgaaaattcactatct

SEQ ID NO: 1341 - DNA, 17 bp, Artificial sequence
  Synthetic oligonucleotide
gtctactatatacatct

SEQ ID NO: 1342 - DNA, 18 bp, Artificial sequence
  Synthetic oligonucleotide
agtctactatatacatct

SEQ ID NO: 1343 - DNA, 17 bp, Artificial sequence
  Synthetic oligonucleotide
agtctactatatacatc

SEQ ID NO: 1344 - DNA, 16 bp, Artificial sequence
  Synthetic oligonucleotide
gtctactatatacatc

SEQ ID NO: 1345 - DNA, 18 bp, Artificial sequence
  Synthetic oligonucleotide
tagtctactatatacatc

SEQ ID NO: 1346 - DNA, 17 bp, Artificial sequence
  Synthetic oligonucleotide
tagtctactatatacat

SEQ ID NO: 1347 - DNA, 18 bp, Artificial sequence
  Synthetic oligonucleotide
ctagtctactatatacat

SEQ ID NO: 1348 - DNA, 17 bp, Artificial sequence
  Synthetic oligonucleotide
ctagtctactatataca

SEQ ID NO: 1349 - DNA, 17 bp, Artificial sequence
  Synthetic oligonucleotide
actagtctactatatac

SEQ ID NO: 1350 - DNA, 16 bp, Artificial sequence
  Synthetic oligonucleotide
ctagtctactatatac

SEQ ID NO: 1351 - DNA, 17 bp, Artificial sequence
  Synthetic oligonucleotide
gtatattctacccataa

SEQ ID NO: 1352 - DNA, 18 bp, Artificial sequence
  Synthetic oligonucleotide
tgtatattctacccataa

SEQ ID NO: 1353 - DNA, 17 bp, Artificial sequence
  Synthetic oligonucleotide
tgtatattctacccata

SEQ ID NO: 1354 - DNA, 18 bp, Artificial sequence
  Synthetic oligonucleotide
atgtatattctacccata

SEQ ID NO: 1355 - DNA, 17 bp, Artificial sequence
  Synthetic oligonucleotide
atgtatattctacccat

SEQ ID NO: 1356 - DNA, 19 bp, Artificial sequence
  Synthetic oligonucleotide
gaaaaccacacaattccta

SEQ ID NO: 1357 - DNA, 18 bp, Artificial sequence
  Synthetic oligonucleotide
gaaaaccacacaattcct

SEQ ID NO: 1358 - DNA, 19 bp, Artificial sequence
  Synthetic oligonucleotide
agaaaaccacacaattcct

SEQ ID NO: 1359 - DNA, 19 bp, Artificial sequence
  Synthetic oligonucleotide
cagaaaaccacacaattcc

SEQ ID NO: 1360 - DNA, 18 bp, Artificial sequence
  Synthetic oligonucleotide
agaaaaccacacaattcc

SEQ ID NO: 1361 - DNA, 19 bp, Artificial sequence
  Synthetic oligonucleotide
ccagaaaaccacacaattc

SEQ ID NO: 1362 - DNA, 18 bp, Artificial sequence
  Synthetic oligonucleotide
ccagaaaaccacacaatt

SEQ ID NO: 1363 - DNA, 18 bp, Artificial sequence
  Synthetic oligonucleotide
tccagaaaaccacacaat

SEQ ID NO: 1364 - DNA, 18 bp, Artificial sequence
  Synthetic oligonucleotide
ttccagaaaaccacacaa

SEQ ID NO: 1365 - DNA, 19 bp, Artificial sequence
  Synthetic oligonucleotide
gatatatcactaaatccat

SEQ ID NO: 1366 - DNA, 18 bp, Artificial sequence
  Synthetic oligonucleotide
gatatatcactaaatcca

SEQ ID NO: 1367 - DNA, 19 bp, Artificial sequence
  Synthetic oligonucleotide
agatatatcactaaatcca

SEQ ID NO: 1368 - DNA, 18 bp, Artificial sequence
  Synthetic oligonucleotide
agatatatcactaaatcc

SEQ ID NO: 1369 - DNA, 19 bp, Artificial sequence
  Synthetic oligonucleotide
tcatatataaatttctcta

SEQ ID NO: 1370 - DNA, 18 bp, Artificial sequence
  Synthetic oligonucleotide
tcatatataaatttctct

SEQ ID NO: 1371 - DNA, 17 bp, Artificial sequence
  Synthetic oligonucleotide
aagatcacacaaccata

SEQ ID NO: 1372 - DNA, 18 bp, Artificial sequence
  Synthetic oligonucleotide
taaaagatcacacaacca

SEQ ID NO: 1373 - DNA, 20 bp, Artificial sequence
  Synthetic oligonucleotide
catcacataaaaacccactt

SEQ ID NO: 1374 - DNA, 19 bp, Artificial sequence
  Synthetic oligonucleotide
catcacataaaaacccact

SEQ ID NO: 1375 - DNA, 20 bp, Artificial sequence
  Synthetic oligonucleotide
tcatcacataaaaacccact

SEQ ID NO: 1376 - DNA, 18 bp, Artificial sequence
  Synthetic oligonucleotide
catcacataaaaacccac

SEQ ID NO: 1377 - DNA, 19 bp, Artificial sequence
  Synthetic oligonucleotide
tcatcacataaaaacccac

SEQ ID NO: 1378 - DNA, 20 bp, Artificial sequence
  Synthetic oligonucleotide
gtcatcacataaaaacccac

SEQ ID NO: 1379 - DNA, 19 bp, Artificial sequence
  Synthetic oligonucleotide
gtcatcacataaaaaccca

SEQ ID NO: 1380 - DNA, 18 bp, Artificial sequence
  Synthetic oligonucleotide
tcatcacataaaaaccca

SEQ ID NO: 1381 - DNA, 17 bp, Artificial sequence
  Synthetic oligonucleotide
catcacataaaaaccca

SEQ ID NO: 1382 - DNA, 17 bp, Artificial sequence
  Synthetic oligonucleotide
tcatcacataaaaaccc

SEQ ID NO: 1383 - DNA, 18 bp, Artificial sequence
  Synthetic oligonucleotide
gtcatcacataaaaaccc

SEQ ID NO: 1384 - DNA, 19 bp, Artificial sequence
  Synthetic oligonucleotide
agtcatcacataaaaaccc

SEQ ID NO: 1385 - DNA, 19 bp, Artificial sequence
  Synthetic oligonucleotide
tagtcatcacataaaaacc

SEQ ID NO: 1386 - DNA, 18 bp, Artificial sequence
  Synthetic oligonucleotide
agtcatcacataaaaacc

SEQ ID NO: 1387 - DNA, 17 bp, Artificial sequence
  Synthetic oligonucleotide
atgctaaatacaaatct

SEQ ID NO: 1388 - DNA, 20 bp, Artificial sequence
  Synthetic oligonucleotide
gaaaccattactacaaccaa

SEQ ID NO: 1389 - DNA, 19 bp, Artificial sequence
  Synthetic oligonucleotide
gaaaccattactacaacca

SEQ ID NO: 1390 - DNA, 19 bp, Artificial sequence
  Synthetic oligonucleotide
atgaaaccattactacaac

SEQ ID NO: 1391 - DNA, 18 bp, Artificial sequence
  Synthetic oligonucleotide
catgaaaccattactaca

SEQ ID NO: 1392 - DNA, 18 bp, Artificial sequence
  Synthetic oligonucleotide
ccatgaaaccattactac

SEQ ID NO: 1393 - DNA, 17 bp, Artificial sequence
  Synthetic oligonucleotide
ctcccatgaaaccatta

SEQ ID NO: 1394 - DNA, 18 bp, Artificial sequence
  Synthetic oligonucleotide
tgcttactttatacaaaa

SEQ ID NO: 1395 - DNA, 18 bp, Artificial sequence
  Synthetic oligonucleotide
atgttaatactttttcca

SEQ ID NO: 1396 - DNA, 17 bp, Artificial sequence
  Synthetic oligonucleotide
cctaatttaacccacaa

SEQ ID NO: 1397 - DNA, 19 bp, Artificial sequence
  Synthetic oligonucleotide
atcctaatttaacccacaa

SEQ ID NO: 1398 - DNA, 18 bp, Artificial sequence
  Synthetic oligonucleotide
tcctaatttaacccacaa

SEQ ID NO: 1399 - DNA, 21 bp, Artificial sequence
  Synthetic oligonucleotide
taatcctaatttaacccacaa

SEQ ID NO: 1400 - DNA, 20 bp, Artificial sequence
  Synthetic oligonucleotide
taatcctaatttaacccaca

SEQ ID NO: 1401 - DNA, 19 bp, Artificial sequence
  Synthetic oligonucleotide
aatcctaatttaacccaca

SEQ ID NO: 1402 - DNA, 17 bp, Artificial sequence
  Synthetic oligonucleotide
tcctaatttaacccaca

SEQ ID NO: 1403 - DNA, 19 bp, Artificial sequence
  Synthetic oligonucleotide
taatcctaatttaacccac

SEQ ID NO: 1404 - DNA, 17 bp, Artificial sequence
  Synthetic oligonucleotide
atcctaatttaacccac

SEQ ID NO: 1405 - DNA, 18 bp, Artificial sequence
  Synthetic oligonucleotide
aatcctaatttaacccac

SEQ ID NO: 1406 - DNA, 18 bp, Artificial sequence
  Synthetic oligonucleotide
taatcctaatttaaccca

SEQ ID NO: 1407 - DNA, 17 bp, Artificial sequence
  Synthetic oligonucleotide
aatcctaatttaaccca

SEQ ID NO: 1408 - DNA, 19 bp, Artificial sequence
  Synthetic oligonucleotide
gtaatcctaatttaaccca

SEQ ID NO: 1409 - DNA, 17 bp, Artificial sequence
  Synthetic oligonucleotide
taatcctaatttaaccc

SEQ ID NO: 1410 - DNA, 18 bp, Artificial sequence
  Synthetic oligonucleotide
gtaatcctaatttaaccc

SEQ ID NO: 1411 - DNA, 19 bp, Artificial sequence
  Synthetic oligonucleotide
agtaatcctaatttaaccc

SEQ ID NO: 1412 - DNA, 18 bp, Artificial sequence
  Synthetic oligonucleotide
agtaatcctaatttaacc

SEQ ID NO: 1413 - DNA, 18 bp, Artificial sequence
  Synthetic oligonucleotide
tcatttatcactaccaca

SEQ ID NO: 1414 - DNA, 20 bp, Artificial sequence
  Synthetic oligonucleotide
catcatttatcactaccaca

SEQ ID NO: 1415 - DNA, 17 bp, Artificial sequence
  Synthetic oligonucleotide
catttatcactaccaca

SEQ ID NO: 1416 - DNA, 19 bp, Artificial sequence
  Synthetic oligonucleotide
atcatttatcactaccaca

SEQ ID NO: 1417 - DNA, 21 bp, Artificial sequence
  Synthetic oligonucleotide
acatcatttatcactaccaca

SEQ ID NO: 1418 - DNA, 17 bp, Artificial sequence
  Synthetic oligonucleotide
tcatttatcactaccac

SEQ ID NO: 1419 - DNA, 18 bp, Artificial sequence
  Synthetic oligonucleotide
atcatttatcactaccac

SEQ ID NO: 1420 - DNA, 19 bp, Artificial sequence
  Synthetic oligonucleotide
catcatttatcactaccac

SEQ ID NO: 1421 - DNA, 21 bp, Artificial sequence
  Synthetic oligonucleotide
aacatcatttatcactaccac

SEQ ID NO: 1422 - DNA, 20 bp, Artificial sequence
  Synthetic oligonucleotide
aacatcatttatcactacca

SEQ ID NO: 1423 - DNA, 18 bp, Artificial sequence
  Synthetic oligonucleotide
catcatttatcactacca

SEQ ID NO: 1424 - DNA, 21 bp, Artificial sequence
  Synthetic oligonucleotide
taacatcatttatcactacca

SEQ ID NO: 1425 - DNA, 19 bp, Artificial sequence
  Synthetic oligonucleotide
acatcatttatcactacca

SEQ ID NO: 1426 - DNA, 20 bp, Artificial sequence
  Synthetic oligonucleotide
taacatcatttatcactacc

SEQ ID NO: 1427 - DNA, 18 bp, Artificial sequence
  Synthetic oligonucleotide
acatcatttatcactacc

SEQ ID NO: 1428 - DNA, 21 bp, Artificial sequence
  Synthetic oligonucleotide
ttaacatcatttatcactacc

SEQ ID NO: 1429 - DNA, 19 bp, Artificial sequence
  Synthetic oligonucleotide
aacatcatttatcactacc

SEQ ID NO: 1430 - DNA, 20 bp, Artificial sequence
  Synthetic oligonucleotide
ttaacatcatttatcactac

SEQ ID NO: 1431 - DNA, 19 bp, Artificial sequence
  Synthetic oligonucleotide
taacatcatttatcactac

SEQ ID NO: 1432 - DNA, 21 bp, Artificial sequence
  Synthetic oligonucleotide
attaacatcatttatcactac

SEQ ID NO: 1433 - DNA, 20 bp, Artificial sequence
  Synthetic oligonucleotide
attaacatcatttatcacta

SEQ ID NO: 1434 - DNA, 19 bp, Artificial sequence
  Synthetic oligonucleotide
ttaacatcatttatcacta

SEQ ID NO: 1435 - DNA, 21 bp, Artificial sequence
  Synthetic oligonucleotide
taattaacatcatttatcact

SEQ ID NO: 1436 - DNA, 21 bp, Artificial sequence
  Synthetic oligonucleotide
ctaattaacatcatttatcac

SEQ ID NO: 1437 - DNA, 21 bp, Artificial sequence
  Synthetic oligonucleotide
cctaattaacatcatttatca

SEQ ID NO: 1438 - DNA, 20 bp, Artificial sequence
  Synthetic oligonucleotide
ctaattaacatcatttatca

SEQ ID NO: 1439 - DNA, 20 bp, Artificial sequence
  Synthetic oligonucleotide
cctaattaacatcatttatc

SEQ ID NO: 1440 - DNA, 21 bp, Artificial sequence
  Synthetic oligonucleotide
ccctaattaacatcatttatc

SEQ ID NO: 1441 - DNA, 19 bp, Artificial sequence
  Synthetic oligonucleotide
cctaattaacatcatttat

SEQ ID NO: 1442 - DNA, 18 bp, Artificial sequence
  Synthetic oligonucleotide
cctaattaacatcattta

SEQ ID NO: 1443 - DNA, 19 bp, Artificial sequence
  Synthetic oligonucleotide
ccctaattaacatcattta

SEQ ID NO: 1444 - DNA, 19 bp, Artificial sequence
  Synthetic oligonucleotide
gccctaattaacatcattt

SEQ ID NO: 1445 - DNA, 18 bp, Artificial sequence
  Synthetic oligonucleotide
ccctaattaacatcattt

SEQ ID NO: 1446 - DNA, 16 bp, Artificial sequence
  Synthetic oligonucleotide
cggccctaattaacat

SEQ ID NO: 1447 - DNA, 15 bp, Artificial sequence
  Synthetic oligonucleotide
ctcggccctaattaa

SEQ ID NO: 1448 - DNA, 21 bp, Artificial sequence
  Synthetic oligonucleotide
cacatataacatataaacaca

SEQ ID NO: 1449 - DNA, 21 bp, Artificial sequence
  Synthetic oligonucleotide
tcacatataacatataaacac

SEQ ID NO: 1450 - DNA, 20 bp, Artificial sequence
  Synthetic oligonucleotide
actatcacatataacatata

SEQ ID NO: 1451 - DNA, 21 bp, Artificial sequence
  Synthetic oligonucleotide
cactatcacatataacatata

SEQ ID NO: 1452 - DNA, 20 bp, Artificial sequence
  Synthetic oligonucleotide
cactatcacatataacatat

SEQ ID NO: 1453 - DNA, 19 bp, Artificial sequence
  Synthetic oligonucleotide
cactatcacatataacata

SEQ ID NO: 1454 - DNA, 18 bp, Artificial sequence
  Synthetic oligonucleotide
cactatcacatataacat

SEQ ID NO: 1455 - DNA, 17 bp, Artificial sequence
  Synthetic oligonucleotide
cactatcacatataaca

SEQ ID NO: 1456 - DNA, 17 bp, Artificial sequence
  Synthetic oligonucleotide
caaagttttcccattac

SEQ ID NO: 1457 - DNA, 17 bp, Artificial sequence
  Synthetic oligonucleotide
acaaagttttcccatta

SEQ ID NO: 1458 - DNA, 17 bp, Artificial sequence
  Synthetic oligonucleotide
tcagtccaacataactc

SEQ ID NO: 1459 - DNA, 16 bp, Artificial sequence
  Synthetic oligonucleotide
cagtccaacataactc

SEQ ID NO: 1460 - DNA, 18 bp, Artificial sequence
  Synthetic oligonucleotide
atcagtccaacataactc

SEQ ID NO: 1461 - DNA, 17 bp, Artificial sequence
  Synthetic oligonucleotide
atcagtccaacataact

SEQ ID NO: 1462 - DNA, 21 bp, Artificial sequence
  Synthetic oligonucleotide
taaacattaaaccctcccaaa

SEQ ID NO: 1463 - DNA, 18 bp, Artificial sequence
  Synthetic oligonucleotide
aacattaaaccctcccaa

SEQ ID NO: 1464 - DNA, 20 bp, Artificial sequence
  Synthetic oligonucleotide
taaacattaaaccctcccaa

SEQ ID NO: 1465 - DNA, 19 bp, Artificial sequence
  Synthetic oligonucleotide
aaacattaaaccctcccaa

SEQ ID NO: 1466 - DNA, 21 bp, Artificial sequence
  Synthetic oligonucleotide
tataaacattaaaccctccca

SEQ ID NO: 1467 - DNA, 16 bp, Artificial sequence
  Synthetic oligonucleotide
aacattaaaccctccc

SEQ ID NO: 1468 - DNA, 17 bp, Artificial sequence
  Synthetic oligonucleotide
aaacattaaaccctccc

SEQ ID NO: 1469 - DNA, 18 bp, Artificial sequence
  Synthetic oligonucleotide
taaacattaaaccctccc

SEQ ID NO: 1470 - DNA, 19 bp, Artificial sequence
  Synthetic oligonucleotide
ataaacattaaaccctccc

SEQ ID NO: 1471 - DNA, 19 bp, Artificial sequence
  Synthetic oligonucleotide
tataaacattaaaccctcc

SEQ ID NO: 1472 - DNA, 17 bp, Artificial sequence
  Synthetic oligonucleotide
taaacattaaaccctcc

SEQ ID NO: 1473 - DNA, 21 bp, Artificial sequence
  Synthetic oligonucleotide
actataaacattaaaccctcc

SEQ ID NO: 1474 - DNA, 18 bp, Artificial sequence
  Synthetic oligonucleotide
ataaacattaaaccctcc

SEQ ID NO: 1475 - DNA, 21 bp, Artificial sequence
  Synthetic oligonucleotide
aactataaacattaaaccctc

SEQ ID NO: 1476 - DNA, 19 bp, Artificial sequence
  Synthetic oligonucleotide
ctataaacattaaaccctc

SEQ ID NO: 1477 - DNA, 20 bp, Artificial sequence
  Synthetic oligonucleotide
actataaacattaaaccctc

SEQ ID NO: 1478 - DNA, 21 bp, Artificial sequence
  Synthetic oligonucleotide
aaactataaacattaaaccct

SEQ ID NO: 1479 - DNA, 18 bp, Artificial sequence
  Synthetic oligonucleotide
ctataaacattaaaccct

SEQ ID NO: 1480 - DNA, 19 bp, Artificial sequence
  Synthetic oligonucleotide
actataaacattaaaccct

SEQ ID NO: 1481 - DNA, 20 bp, Artificial sequence
  Synthetic oligonucleotide
aactataaacattaaaccct

SEQ ID NO: 1482 - DNA, 19 bp, Artificial sequence
  Synthetic oligonucleotide
gctttaaactataaacatt

SEQ ID NO: 1483 - DNA, 18 bp, Artificial sequence
  Synthetic oligonucleotide
tgctttaaactataaaca

SEQ ID NO: 1484 - DNA, 17 bp, Artificial sequence
  Synthetic oligonucleotide
cagatttatcactatta

SEQ ID NO: 1485 - DNA, 17 bp, Artificial sequence
  Synthetic oligonucleotide
tcacagcctatcaccac

SEQ ID NO: 1486 - DNA, 17 bp, Artificial sequence
  Synthetic oligonucleotide
atcacagcctatcacca

SEQ ID NO: 1487 - DNA, 17 bp, Artificial sequence
  Synthetic oligonucleotide
aatcacagcctatcacc

SEQ ID NO: 1488 - DNA, 16 bp, Artificial sequence
  Synthetic oligonucleotide
atcacagcctatcacc

SEQ ID NO: 1489 - DNA, 16 bp, Artificial sequence
  Synthetic oligonucleotide
gcgtcacccaaatcac

SEQ ID NO: 1490 - DNA, 16 bp, Artificial sequence
  Synthetic oligonucleotide
agcgtcacccaaatca

SEQ ID NO: 1491 - DNA, 15 bp, Artificial sequence
  Synthetic oligonucleotide
agcgtcacccaaatc

SEQ ID NO: 1492 - DNA, 17 bp, Artificial sequence
  Synthetic oligonucleotide
cagatcctaaaatcact

SEQ ID NO: 1493 - DNA, 17 bp, Artificial sequence
  Synthetic oligonucleotide
tcagatcctaaaatcac

SEQ ID NO: 1494 - DNA, 18 bp, Artificial sequence
  Synthetic oligonucleotide
agtaaaaccaatcatcat

SEQ ID NO: 1495 - DNA, 17 bp, Artificial sequence
  Synthetic oligonucleotide
agtaaaaccaatcatca

SEQ ID NO: 1496 - DNA, 20 bp, Artificial sequence
  Synthetic oligonucleotide
cccttccatctctactaaaa

SEQ ID NO: 1497 - DNA, 20 bp, Artificial sequence
  Synthetic oligonucleotide
ataactacataacaaaccca

SEQ ID NO: 1498 - DNA, 21 bp, Artificial sequence
  Synthetic oligonucleotide
aataactacataacaaaccca

SEQ ID NO: 1499 - DNA, 18 bp, Artificial sequence
  Synthetic oligonucleotide
aactacataacaaaccca

SEQ ID NO: 1500 - DNA, 19 bp, Artificial sequence
  Synthetic oligonucleotide
taactacataacaaaccca

SEQ ID NO: 1501 - DNA, 17 bp, Artificial sequence
  Synthetic oligonucleotide
actacataacaaaccca

SEQ ID NO: 1502 - DNA, 21 bp, Artificial sequence
  Synthetic oligonucleotide
caataactacataacaaaccc

SEQ ID NO: 1503 - DNA, 19 bp, Artificial sequence
  Synthetic oligonucleotide
ataactacataacaaaccc

SEQ ID NO: 1504 - DNA, 21 bp, Artificial sequence
  Synthetic oligonucleotide
acaataactacataacaaacc

SEQ ID NO: 1505 - DNA, 19 bp, Artificial sequence
  Synthetic oligonucleotide
tgaattcacaataactaca

SEQ ID NO: 1506 - DNA, 18 bp, Artificial sequence
  Synthetic oligonucleotide
gcacatttttcttaaact

SEQ ID NO: 1507 - DNA, 19 bp, Artificial sequence
  Synthetic oligonucleotide
gctatacctaaaacaatct

SEQ ID NO: 1508 - DNA, 18 bp, Artificial sequence
  Synthetic oligonucleotide
gctatacctaaaacaatc

SEQ ID NO: 1509 - DNA, 17 bp, Artificial sequence
  Synthetic oligonucleotide
cccttgtaactaaaaat

SEQ ID NO: 1510 - DNA, 17 bp, Artificial sequence
  Synthetic oligonucleotide
ccccttgtaactaaaaa

SEQ ID NO: 1511 - DNA, 16 bp, Artificial sequence
  Synthetic oligonucleotide
ccccttgtaactaaaa

SEQ ID NO: 1512 - DNA, 16 bp, Artificial sequence
  Synthetic oligonucleotide
accccttgtaactaaa

SEQ ID NO: 1513 - DNA, 16 bp, Artificial sequence
  Synthetic oligonucleotide
caccccttgtaactaa

SEQ ID NO: 1514 - DNA, 16 bp, Artificial sequence
  Synthetic oligonucleotide
acaccccttgtaacta

SEQ ID NO: 1515 - DNA, 17 bp, Artificial sequence
  Synthetic oligonucleotide
gctaaaactaatcatct

SEQ ID NO: 1516 - DNA, 16 bp, Artificial sequence
  Synthetic oligonucleotide
ggctaaaactaatcat

SEQ ID NO: 1517 - DNA, 21 bp, Artificial sequence
  Synthetic oligonucleotide
ttacccttcatatatacatct

SEQ ID NO: 1518 - DNA, 21 bp, Artificial sequence
  Synthetic oligonucleotide
attacccttcatatatacatc

SEQ ID NO: 1519 - DNA, 20 bp, Artificial sequence
  Synthetic oligonucleotide
ttacccttcatatatacatc

SEQ ID NO: 1520 - DNA, 21 bp, Artificial sequence
  Synthetic oligonucleotide
cattacccttcatatatacat

SEQ ID NO: 1521 - DNA, 19 bp, Artificial sequence
  Synthetic oligonucleotide
ttacccttcatatatacat

SEQ ID NO: 1522 - DNA, 20 bp, Artificial sequence
  Synthetic oligonucleotide
attacccttcatatatacat

SEQ ID NO: 1523 - DNA, 21 bp, Artificial sequence
  Synthetic oligonucleotide
acattacccttcatatataca

SEQ ID NO: 1524 - DNA, 18 bp, Artificial sequence
  Synthetic oligonucleotide
ttacccttcatatataca

SEQ ID NO: 1525 - DNA, 20 bp, Artificial sequence
  Synthetic oligonucleotide
cattacccttcatatataca

SEQ ID NO: 1526 - DNA, 19 bp, Artificial sequence
  Synthetic oligonucleotide
attacccttcatatataca

SEQ ID NO: 1527 - DNA, 18 bp, Artificial sequence
  Synthetic oligonucleotide
attacccttcatatatac

SEQ ID NO: 1528 - DNA, 17 bp, Artificial sequence
  Synthetic oligonucleotide
ttacccttcatatatac

SEQ ID NO: 1529 - DNA, 19 bp, Artificial sequence
  Synthetic oligonucleotide
cattacccttcatatatac

SEQ ID NO: 1530 - DNA, 20 bp, Artificial sequence
  Synthetic oligonucleotide
acattacccttcatatatac

SEQ ID NO: 1531 - DNA, 21 bp, Artificial sequence
  Synthetic oligonucleotide
tacattacccttcatatatac

SEQ ID NO: 1532 - DNA, 18 bp, Artificial sequence
  Synthetic oligonucleotide
cattacccttcatatata

SEQ ID NO: 1533 - DNA, 20 bp, Artificial sequence
  Synthetic oligonucleotide
tacattacccttcatatata

SEQ ID NO: 1534 - DNA, 17 bp, Artificial sequence
  Synthetic oligonucleotide
attacccttcatatata

SEQ ID NO: 1535 - DNA, 19 bp, Artificial sequence
  Synthetic oligonucleotide
acattacccttcatatata

SEQ ID NO: 1536 - DNA, 17 bp, Artificial sequence
  Synthetic oligonucleotide
cattacccttcatatat

SEQ ID NO: 1537 - DNA, 18 bp, Artificial sequence
  Synthetic oligonucleotide
acattacccttcatatat

SEQ ID NO: 1538 - DNA, 19 bp, Artificial sequence
  Synthetic oligonucleotide
tacattacccttcatatat

SEQ ID NO: 1539 - DNA, 17 bp, Artificial sequence
  Synthetic oligonucleotide
acattacccttcatata

SEQ ID NO: 1540 - DNA, 18 bp, Artificial sequence
  Synthetic oligonucleotide
tacattacccttcatata

SEQ ID NO: 1541 - DNA, 17 bp, Artificial sequence
  Synthetic oligonucleotide
tacattacccttcatat

SEQ ID NO: 1542 - DNA, 17 bp, Artificial sequence
  Synthetic oligonucleotide
gattcttatacttacta

SEQ ID NO: 1543 - DNA, 17 bp, Artificial sequence
  Synthetic oligonucleotide
tgattcttatacttact

SEQ ID NO: 1544 - DNA, 18 bp, Artificial sequence
  Synthetic oligonucleotide
atgattcttatacttact

SEQ ID NO: 1545 - DNA, 17 bp, Artificial sequence
  Synthetic oligonucleotide
gcctcatttttaccttt

SEQ ID NO: 1546 - DNA, 17 bp, Artificial sequence
  Synthetic oligonucleotide
accaatcttctatttta

SEQ ID NO: 1547 - DNA, 19 bp, Artificial sequence
  Synthetic oligonucleotide
caaccaatcttctatttta

SEQ ID NO: 1548 - DNA, 19 bp, Artificial sequence
  Synthetic oligonucleotide
gcaaccaatcttctatttt

SEQ ID NO: 1549 - DNA, 18 bp, Artificial sequence
  Synthetic oligonucleotide
gcaaccaatcttctattt

SEQ ID NO: 1550 - DNA, 17 bp, Artificial sequence
  Synthetic oligonucleotide
gcaaccaatcttctatt

SEQ ID NO: 1551 - DNA, 18 bp, Artificial sequence
  Synthetic oligonucleotide
tgcaaccaatcttctatt

SEQ ID NO: 1552 - DNA, 17 bp, Artificial sequence
  Synthetic oligonucleotide
taactgcaaccaatctt

SEQ ID NO: 1553 - DNA, 18 bp, Artificial sequence
  Synthetic oligonucleotide
tgaatacaacacacatca

SEQ ID NO: 1554 - DNA, 19 bp, Artificial sequence
  Synthetic oligonucleotide
atgaatacaacacacatca

SEQ ID NO: 1555 - DNA, 19 bp, Artificial sequence
  Synthetic oligonucleotide
taaaaatataactactcct

SEQ ID NO: 1556 - DNA, 19 bp, Artificial sequence
  Synthetic oligonucleotide
gtaaaaatataactactcc

SEQ ID NO: 1557 - DNA, 17 bp, Artificial sequence
  Synthetic oligonucleotide
tcaactgatacccacaa

SEQ ID NO: 1558 - DNA, 18 bp, Artificial sequence
  Synthetic oligonucleotide
tgtcttaacatttttctt

SEQ ID NO: 1559 - DNA, 21 bp, Artificial sequence
  Synthetic oligonucleotide
ccacttcaaacttttaattaa

SEQ ID NO: 1560 - DNA, 20 bp, Artificial sequence
  Synthetic oligonucleotide
ccacttcaaacttttaatta

SEQ ID NO: 1561 - DNA, 21 bp, Artificial sequence
  Synthetic oligonucleotide
cccacttcaaacttttaatta

SEQ ID NO: 1562 - DNA, 19 bp, Artificial sequence
  Synthetic oligonucleotide
ccacttcaaacttttaatt

SEQ ID NO: 1563 - DNA, 20 bp, Artificial sequence
  Synthetic oligonucleotide
cccacttcaaacttttaatt

SEQ ID NO: 1564 - DNA, 21 bp, Artificial sequence
  Synthetic oligonucleotide
acccacttcaaacttttaatt

SEQ ID NO: 1565 - DNA, 18 bp, Artificial sequence
  Synthetic oligonucleotide
ccacttcaaacttttaat

SEQ ID NO: 1566 - DNA, 20 bp, Artificial sequence
  Synthetic oligonucleotide
acccacttcaaacttttaat

SEQ ID NO: 1567 - DNA, 21 bp, Artificial sequence
  Synthetic oligonucleotide
aacccacttcaaacttttaat

SEQ ID NO: 1568 - DNA, 18 bp, Artificial sequence
  Synthetic oligonucleotide
cccacttcaaacttttaa

SEQ ID NO: 1569 - DNA, 19 bp, Artificial sequence
  Synthetic oligonucleotide
acccacttcaaacttttaa

SEQ ID NO: 1570 - DNA, 17 bp, Artificial sequence
  Synthetic oligonucleotide
cccacttcaaactttta

SEQ ID NO: 1571 - DNA, 18 bp, Artificial sequence
  Synthetic oligonucleotide
acccacttcaaactttta

SEQ ID NO: 1572 - DNA, 19 bp, Artificial sequence
  Synthetic oligonucleotide
aacccacttcaaactttta

SEQ ID NO: 1573 - DNA, 17 bp, Artificial sequence
  Synthetic oligonucleotide
acccacttcaaactttt

SEQ ID NO: 1574 - DNA, 18 bp, Artificial sequence
  Synthetic oligonucleotide
aacccacttcaaactttt

SEQ ID NO: 1575 - DNA, 17 bp, Artificial sequence
  Synthetic oligonucleotide
aacccacttcaaacttt

SEQ ID NO: 1576 - DNA, 16 bp, Artificial sequence
  Synthetic oligonucleotide
ggactctattaatcaa

SEQ ID NO: 1577 - DNA, 17 bp, Artificial sequence
  Synthetic oligonucleotide
gaatattctactcttct

SEQ ID NO: 1578 - DNA, 18 bp, Artificial sequence
  Synthetic oligonucleotide
ctgtatttaccaattcaa

SEQ ID NO: 1579 - DNA, 17 bp, Artificial sequence
  Synthetic oligonucleotide
ctgtatttaccaattca

SEQ ID NO: 1580 - DNA, 18 bp, Artificial sequence
  Synthetic oligonucleotide
actgtatttaccaattca

SEQ ID NO: 1581 - DNA, 17 bp, Artificial sequence
  Synthetic oligonucleotide
actgtatttaccaattc

SEQ ID NO: 1582 - DNA, 17 bp, Artificial sequence
  Synthetic oligonucleotide
cactgtatttaccaatt

SEQ ID NO: 1583 - DNA, 17 bp, Artificial sequence
  Synthetic oligonucleotide
tcactgtatttaccaat

SEQ ID NO: 1584 - DNA, 21 bp, Artificial sequence
  Synthetic oligonucleotide
ccaactactttacttttcaaa

SEQ ID NO: 1585 - DNA, 20 bp, Artificial sequence
  Synthetic oligonucleotide
ccaactactttacttttcaa

SEQ ID NO: 1586 - DNA, 21 bp, Artificial sequence
  Synthetic oligonucleotide
accaactactttacttttcaa

SEQ ID NO: 1587 - DNA, 19 bp, Artificial sequence
  Synthetic oligonucleotide
ccaactactttacttttca

SEQ ID NO: 1588 - DNA, 21 bp, Artificial sequence
  Synthetic oligonucleotide
taccaactactttacttttca

SEQ ID NO: 1589 - DNA, 20 bp, Artificial sequence
  Synthetic oligonucleotide
accaactactttacttttca

SEQ ID NO: 1590 - DNA, 20 bp, Artificial sequence
  Synthetic oligonucleotide
taccaactactttacttttc

SEQ ID NO: 1591 - DNA, 19 bp, Artificial sequence
  Synthetic oligonucleotide
gtaccaactactttacttt

SEQ ID NO: 1592 - DNA, 18 bp, Artificial sequence
  Synthetic oligonucleotide
gtaccaactactttactt

SEQ ID NO: 1593 - DNA, 17 bp, Artificial sequence
  Synthetic oligonucleotide
gtaccaactactttact

SEQ ID NO: 1594 - DNA, 18 bp, Artificial sequence
  Synthetic oligonucleotide
tgtaccaactactttact

SEQ ID NO: 1595 - DNA, 18 bp, Artificial sequence
  Synthetic oligonucleotide
ttgtaccaactactttac

SEQ ID NO: 1596 - DNA, 16 bp, Artificial sequence
  Synthetic oligonucleotide
gtaccaactactttac

SEQ ID NO: 1597 - DNA, 17 bp, Artificial sequence
  Synthetic oligonucleotide
tgtaccaactactttac

SEQ ID NO: 1598 - DNA, 17 bp, Artificial sequence
  Synthetic oligonucleotide
ttgtaccaactacttta

SEQ ID NO: 1599 - DNA, 20 bp, Artificial sequence
  Synthetic oligonucleotide
atttcatttttcttttaata

SEQ ID NO: 1600 - DNA, 20 bp, Artificial sequence
  Synthetic oligonucleotide
cctaatttcatttttctttt

SEQ ID NO: 1601 - DNA, 20 bp, Artificial sequence
  Synthetic oligonucleotide
tcctaatttcatttttcttt

SEQ ID NO: 1602 - DNA, 21 bp, Artificial sequence
  Synthetic oligonucleotide
ttcttcattataccatcaaat

SEQ ID NO: 1603 - DNA, 21 bp, Artificial sequence
  Synthetic oligonucleotide
tttcttcattataccatcaaa

SEQ ID NO: 1604 - DNA, 21 bp, Artificial sequence
  Synthetic oligonucleotide
ttttcttcattataccatcaa

SEQ ID NO: 1605 - DNA, 18 bp, Artificial sequence
  Synthetic oligonucleotide
tcttcattataccatcaa

SEQ ID NO: 1606 - DNA, 20 bp, Artificial sequence
  Synthetic oligonucleotide
tttcttcattataccatcaa

SEQ ID NO: 1607 - DNA, 19 bp, Artificial sequence
  Synthetic oligonucleotide
ttcttcattataccatcaa

SEQ ID NO: 1608 - DNA, 21 bp, Artificial sequence
  Synthetic oligonucleotide
atattttcttcattataccat

SEQ ID NO: 1609 - DNA, 20 bp, Artificial sequence
  Synthetic oligonucleotide
atattttcttcattatacca

SEQ ID NO: 1610 - DNA, 21 bp, Artificial sequence
  Synthetic oligonucleotide
aatattttcttcattatacca

SEQ ID NO: 1611 - DNA, 21 bp, Artificial sequence
  Synthetic oligonucleotide
aaatattttcttcattatacc

SEQ ID NO: 1612 - DNA, 19 bp, Artificial sequence
  Synthetic oligonucleotide
atattttcttcattatacc

SEQ ID NO: 1613 - DNA, 20 bp, Artificial sequence
  Synthetic oligonucleotide
aatattttcttcattatacc

SEQ ID NO: 1614 - DNA, 20 bp, Artificial sequence
  Synthetic oligonucleotide
taaatattttcttcattata

SEQ ID NO: 1615 - DNA, 19 bp, Artificial sequence
  Synthetic oligonucleotide
ttttccttcatctacttct

SEQ ID NO: 1616 - DNA, 20 bp, Artificial sequence
  Synthetic oligonucleotide
attttccttcatctacttct

SEQ ID NO: 1617 - DNA, 20 bp, Artificial sequence
  Synthetic oligonucleotide
aattttccttcatctacttc

SEQ ID NO: 1618 - DNA, 18 bp, Artificial sequence
  Synthetic oligonucleotide
agaattttccttcatcta

SEQ ID NO: 1619 - DNA, 18 bp, Artificial sequence
  Synthetic oligonucleotide
cagaattttccttcatct

SEQ ID NO: 1620 - DNA, 18 bp, Artificial sequence
  Synthetic oligonucleotide
tcagaattttccttcatc

SEQ ID NO: 1621 - DNA, 18 bp, Artificial sequence
  Synthetic oligonucleotide
ctagaaatatctcacatt

SEQ ID NO: 1622 - DNA, 17 bp, Artificial sequence
  Synthetic oligonucleotide
ctagaaatatctcacat

SEQ ID NO: 1623 - DNA, 17 bp, Artificial sequence
  Synthetic oligonucleotide
actagaaatatctcaca

SEQ ID NO: 1624 - DNA, 17 bp, Artificial sequence
  Synthetic oligonucleotide
attagccattaatctat

SEQ ID NO: 1625 - DNA, 18 bp, Artificial sequence
  Synthetic oligonucleotide
ttgttacaaaataatcca

SEQ ID NO: 1626 - DNA, 19 bp, Artificial sequence
  Synthetic oligonucleotide
ttattttttacattaacta

SEQ ID NO: 1627 - DNA, 19 bp, Artificial sequence
  Synthetic oligonucleotide
tgccaaaatactaacatca

SEQ ID NO: 1628 - DNA, 18 bp, Artificial sequence
  Synthetic oligonucleotide
gccaaaatactaacatca

SEQ ID NO: 1629 - DNA, 18 bp, Artificial sequence
  Synthetic oligonucleotide
tgccaaaatactaacatc

SEQ ID NO: 1630 - DNA, 16 bp, Artificial sequence
  Synthetic oligonucleotide
gagtacaacacttaca

SEQ ID NO: 1631 - DNA, 18 bp, Artificial sequence
  Synthetic oligonucleotide
cacatccattcattttat

SEQ ID NO: 1632 - DNA, 19 bp, Artificial sequence
  Synthetic oligonucleotide
ccacatccattcattttat

SEQ ID NO: 1633 - DNA, 18 bp, Artificial sequence
  Synthetic oligonucleotide
ccacatccattcatttta

SEQ ID NO: 1634 - DNA, 18 bp, Artificial sequence
  Synthetic oligonucleotide
tatgccacatccattcat

SEQ ID NO: 1635 - DNA, 18 bp, Artificial sequence
  Synthetic oligonucleotide
ttatgccacatccattca

SEQ ID NO: 1636 - DNA, 17 bp, Artificial sequence
  Synthetic oligonucleotide
tatgccacatccattca

SEQ ID NO: 1637 - DNA, 17 bp, Artificial sequence
  Synthetic oligonucleotide
ttatgccacatccattc

SEQ ID NO: 1638 - DNA, 17 bp, Artificial sequence
  Synthetic oligonucleotide
attatgccacatccatt

SEQ ID NO: 1639 - DNA, 18 bp, Artificial sequence
  Synthetic oligonucleotide
agtttcatatttttaatc

SEQ ID NO: 1640 - DNA, 17 bp, Artificial sequence
  Synthetic oligonucleotide
atcactgcacactttcc

SEQ ID NO: 1641 - DNA, 18 bp, Artificial sequence
  Synthetic oligonucleotide
aagctctttccaaattct

SEQ ID NO: 1642 - DNA, 18 bp, Artificial sequence
  Synthetic oligonucleotide
tagttcttaactcttctc

SEQ ID NO: 1643 - DNA, 17 bp, Artificial sequence
  Synthetic oligonucleotide
ttagttcttaactcttc

SEQ ID NO: 1644 - DNA, 17 bp, Artificial sequence
  Synthetic oligonucleotide
agcttcaaatactcaaa

SEQ ID NO: 1645 - DNA, 17 bp, Artificial sequence
  Synthetic oligonucleotide
tttcaaagccacaccta

SEQ ID NO: 1646 - DNA, 19 bp, Artificial sequence
  Synthetic oligonucleotide
aatatcctcattacccatt

SEQ ID NO: 1647 - DNA, 17 bp, Artificial sequence
  Synthetic oligonucleotide
tatcctcattacccatt

SEQ ID NO: 1648 - DNA, 18 bp, Artificial sequence
  Synthetic oligonucleotide
atatcctcattacccatt

SEQ ID NO: 1649 - DNA, 18 bp, Artificial sequence
  Synthetic oligonucleotide
aatatcctcattacccat

SEQ ID NO: 1650 - DNA, 19 bp, Artificial sequence
  Synthetic oligonucleotide
taatatcctcattacccat

SEQ ID NO: 1651 - DNA, 20 bp, Artificial sequence
  Synthetic oligonucleotide
ttaatatcctcattacccat

SEQ ID NO: 1652 - DNA, 17 bp, Artificial sequence
  Synthetic oligonucleotide
atatcctcattacccat

SEQ ID NO: 1653 - DNA, 17 bp, Artificial sequence
  Synthetic oligonucleotide
aatatcctcattaccca

SEQ ID NO: 1654 - DNA, 18 bp, Artificial sequence
  Synthetic oligonucleotide
taatatcctcattaccca

SEQ ID NO: 1655 - DNA, 20 bp, Artificial sequence
  Synthetic oligonucleotide
tttaatatcctcattaccca

SEQ ID NO: 1656 - DNA, 19 bp, Artificial sequence
  Synthetic oligonucleotide
ttaatatcctcattaccca

SEQ ID NO: 1657 - DNA, 20 bp, Artificial sequence
  Synthetic oligonucleotide
atttaatatcctcattaccc

SEQ ID NO: 1658 - DNA, 17 bp, Artificial sequence
  Synthetic oligonucleotide
taatatcctcattaccc

SEQ ID NO: 1659 - DNA, 18 bp, Artificial sequence
  Synthetic oligonucleotide
ttaatatcctcattaccc

SEQ ID NO: 1660 - DNA, 19 bp, Artificial sequence
  Synthetic oligonucleotide
tttaatatcctcattaccc

SEQ ID NO: 1661 - DNA, 21 bp, Artificial sequence
  Synthetic oligonucleotide
aatttaatatcctcattaccc

SEQ ID NO: 1662 - DNA, 18 bp, Artificial sequence
  Synthetic oligonucleotide
tttaatatcctcattacc

SEQ ID NO: 1663 - DNA, 20 bp, Artificial sequence
  Synthetic oligonucleotide
aatttaatatcctcattacc

SEQ ID NO: 1664 - DNA, 17 bp, Artificial sequence
  Synthetic oligonucleotide
ttaatatcctcattacc

SEQ ID NO: 1665 - DNA, 21 bp, Artificial sequence
  Synthetic oligonucleotide
aaatttaatatcctcattacc

SEQ ID NO: 1666 - DNA, 19 bp, Artificial sequence
  Synthetic oligonucleotide
atttaatatcctcattacc

SEQ ID NO: 1667 - DNA, 21 bp, Artificial sequence
  Synthetic oligonucleotide
taaatttaatatcctcattac

SEQ ID NO: 1668 - DNA, 21 bp, Artificial sequence
  Synthetic oligonucleotide
ttaaatttaatatcctcatta

SEQ ID NO: 1669 - DNA, 21 bp, Artificial sequence
  Synthetic oligonucleotide
cttaaatttaatatcctcatt

SEQ ID NO: 1670 - DNA, 21 bp, Artificial sequence
  Synthetic oligonucleotide
tcttaaatttaatatcctcat

SEQ ID NO: 1671 - DNA, 20 bp, Artificial sequence
  Synthetic oligonucleotide
tcttaaatttaatatcctca

SEQ ID NO: 1672 - DNA, 21 bp, Artificial sequence
  Synthetic oligonucleotide
ttcttaaatttaatatcctca

SEQ ID NO: 1673 - DNA, 20 bp, Artificial sequence
  Synthetic oligonucleotide
ttcttaaatttaatatcctc

SEQ ID NO: 1674 - DNA, 19 bp, Artificial sequence
  Synthetic oligonucleotide
tcttaaatttaatatcctc

SEQ ID NO: 1675 - DNA, 19 bp, Artificial sequence
  Synthetic oligonucleotide
ttcttaaatttaatatcct

SEQ ID NO: 1676 - DNA, 18 bp, Artificial sequence
  Synthetic oligonucleotide
tcttaaatttaatatcct

SEQ ID NO: 1677 - DNA, 17 bp, Artificial sequence
  Synthetic oligonucleotide
aatagcctttattctac

SEQ ID NO: 1678 - DNA, 18 bp, Artificial sequence
  Synthetic oligonucleotide
cagcaacaattattaata

SEQ ID NO: 1679 - DNA, 18 bp, Artificial sequence
  Synthetic oligonucleotide
ccagcaacaattattaat

SEQ ID NO: 1680 - DNA, 18 bp, Artificial sequence
  Synthetic oligonucleotide
accagcaacaattattaa

SEQ ID NO: 1681 - DNA, 17 bp, Artificial sequence
  Synthetic oligonucleotide
accagcaacaattatta

SEQ ID NO: 1682 - DNA, 17 bp, Artificial sequence
  Synthetic oligonucleotide
taccagcaacaattatt

SEQ ID NO: 1683 - DNA, 20 bp, Artificial sequence
  Synthetic oligonucleotide
ccccaaatctaaaacacttc

SEQ ID NO: 1684 - DNA, 21 bp, Artificial sequence
  Synthetic oligonucleotide
aaccccaaatctaaaacactt

SEQ ID NO: 1685 - DNA, 19 bp, Artificial sequence
  Synthetic oligonucleotide
ccccaaatctaaaacactt

SEQ ID NO: 1686 - DNA, 20 bp, Artificial sequence
  Synthetic oligonucleotide
aaccccaaatctaaaacact

SEQ ID NO: 1687 - DNA, 19 bp, Artificial sequence
  Synthetic oligonucleotide
accccaaatctaaaacact

SEQ ID NO: 1688 - DNA, 18 bp, Artificial sequence
  Synthetic oligonucleotide
accccaaatctaaaacac

SEQ ID NO: 1689 - DNA, 19 bp, Artificial sequence
  Synthetic oligonucleotide
gcaaatattcacaaatcct

SEQ ID NO: 1690 - DNA, 21 bp, Artificial sequence
  Synthetic oligonucleotide
actatttaacacacattatca

SEQ ID NO: 1691 - DNA, 20 bp, Artificial sequence
  Synthetic oligonucleotide
ctatttaacacacattatca

SEQ ID NO: 1692 - DNA, 21 bp, Artificial sequence
  Synthetic oligonucleotide
tactatttaacacacattatc

SEQ ID NO: 1693 - DNA, 20 bp, Artificial sequence
  Synthetic oligonucleotide
actatttaacacacattatc

SEQ ID NO: 1694 - DNA, 20 bp, Artificial sequence
  Synthetic oligonucleotide
tactatttaacacacattat

SEQ ID NO: 1695 - DNA, 21 bp, Artificial sequence
  Synthetic oligonucleotide
ctactatttaacacacattat

SEQ ID NO: 1696 - DNA, 20 bp, Artificial sequence
  Synthetic oligonucleotide
ctactatttaacacacatta

SEQ ID NO: 1697 - DNA, 21 bp, Artificial sequence
  Synthetic oligonucleotide
actactatttaacacacatta

SEQ ID NO: 1698 - DNA, 19 bp, Artificial sequence
  Synthetic oligonucleotide
ctactatttaacacacatt

SEQ ID NO: 1699 - DNA, 20 bp, Artificial sequence
  Synthetic oligonucleotide
actactatttaacacacatt

SEQ ID NO: 1700 - DNA, 19 bp, Artificial sequence
  Synthetic oligonucleotide
actactatttaacacacat

SEQ ID NO: 1701 - DNA, 17 bp, Artificial sequence
  Synthetic oligonucleotide
ctactatttaacacaca

SEQ ID NO: 1702 - DNA, 18 bp, Artificial sequence
  Synthetic oligonucleotide
actactatttaacacaca

SEQ ID NO: 1703 - DNA, 17 bp, Artificial sequence
  Synthetic oligonucleotide
tatagacccttaatatt

SEQ ID NO: 1704 - DNA, 17 bp, Artificial sequence
  Synthetic oligonucleotide
ttatagacccttaatat

SEQ ID NO: 1705 - DNA, 21 bp, Artificial sequence
  Synthetic oligonucleotide
catcacaaaataacctatcat

SEQ ID NO: 1706 - DNA, 21 bp, Artificial sequence
  Synthetic oligonucleotide
tcatcacaaaataacctatca

SEQ ID NO: 1707 - DNA, 21 bp, Artificial sequence
  Synthetic oligonucleotide
ttcatcacaaaataacctatc

SEQ ID NO: 1708 - DNA, 19 bp, Artificial sequence
  Synthetic oligonucleotide
ttcatcacaaaataaccta

SEQ ID NO: 1709 - DNA, 20 bp, Artificial sequence
  Synthetic oligonucleotide
tttcatcacaaaataaccta

SEQ ID NO: 1710 - DNA, 18 bp, Artificial sequence
  Synthetic oligonucleotide
tcatcacaaaataaccta

SEQ ID NO: 1711 - DNA, 21 bp, Artificial sequence
  Synthetic oligonucleotide
ttttcatcacaaaataaccta

SEQ ID NO: 1712 - DNA, 21 bp, Artificial sequence
  Synthetic oligonucleotide
attttcatcacaaaataacct

SEQ ID NO: 1713 - DNA, 21 bp, Artificial sequence
  Synthetic oligonucleotide
tattttcatcacaaaataacc

SEQ ID NO: 1714 - DNA, 19 bp, Artificial sequence
  Synthetic oligonucleotide
gtattttcatcacaaaata

SEQ ID NO: 1715 - DNA, 16 bp, Artificial sequence
  Synthetic oligonucleotide
ttacctagatcactcc

SEQ ID NO: 1716 - DNA, 16 bp, Artificial sequence
  Synthetic oligonucleotide
cttacctagatcactc

SEQ ID NO: 1717 - DNA, 16 bp, Artificial sequence
  Synthetic oligonucleotide
ccttacctagatcact

SEQ ID NO: 1718 - DNA, 17 bp, Artificial sequence
  Synthetic oligonucleotide
taactgctccttaatcc

SEQ ID NO: 1719 - DNA, 17 bp, Artificial sequence
  Synthetic oligonucleotide
tctagcaatcctctcct

SEQ ID NO: 1720 - DNA, 17 bp, Artificial sequence
  Synthetic oligonucleotide
ttctagcaatcctctcc

SEQ ID NO: 1721 - DNA, 21 bp, Artificial sequence
  Synthetic oligonucleotide
ttttcacctactaatattcat

SEQ ID NO: 1722 - DNA, 20 bp, Artificial sequence
  Synthetic oligonucleotide
tttcacctactaatattcat

SEQ ID NO: 1723 - DNA, 19 bp, Artificial sequence
  Synthetic oligonucleotide
ttcacctactaatattcat

SEQ ID NO: 1724 - DNA, 18 bp, Artificial sequence
  Synthetic oligonucleotide
tcacctactaatattcat

SEQ ID NO: 1725 - DNA, 17 bp, Artificial sequence
  Synthetic oligonucleotide
tcacctactaatattca

SEQ ID NO: 1726 - DNA, 19 bp, Artificial sequence
  Synthetic oligonucleotide
tttcacctactaatattca

SEQ ID NO: 1727 - DNA, 20 bp, Artificial sequence
  Synthetic oligonucleotide
ttttcacctactaatattca

SEQ ID NO: 1728 - DNA, 21 bp, Artificial sequence
  Synthetic oligonucleotide
tttttcacctactaatattca

SEQ ID NO: 1729 - DNA, 18 bp, Artificial sequence
  Synthetic oligonucleotide
ttcacctactaatattca

SEQ ID NO: 1730 - DNA, 21 bp, Artificial sequence
  Synthetic oligonucleotide
atttttcacctactaatattc

SEQ ID NO: 1731 - DNA, 20 bp, Artificial sequence
  Synthetic oligonucleotide
tttttcacctactaatattc

SEQ ID NO: 1732 - DNA, 21 bp, Artificial sequence
  Synthetic oligonucleotide
tatttttcacctactaatatt

SEQ ID NO: 1733 - DNA, 20 bp, Artificial sequence
  Synthetic oligonucleotide
tatttttcacctactaatat

SEQ ID NO: 1734 - DNA, 21 bp, Artificial sequence
  Synthetic oligonucleotide
ttatttttcacctactaatat

SEQ ID NO: 1735 - DNA, 20 bp, Artificial sequence
  Synthetic oligonucleotide
ttatttttcacctactaata

SEQ ID NO: 1736 - DNA, 19 bp, Artificial sequence
  Synthetic oligonucleotide
tatttttcacctactaata

SEQ ID NO: 1737 - DNA, 21 bp, Artificial sequence
  Synthetic oligonucleotide
tttatttttcacctactaata

SEQ ID NO: 1738 - DNA, 19 bp, Artificial sequence
  Synthetic oligonucleotide
tttatttttcacctactaa

SEQ ID NO: 1739 - DNA, 18 bp, Artificial sequence
  Synthetic oligonucleotide
tttatttttcacctacta

SEQ ID NO: 1740 - DNA, 20 bp, Artificial sequence
  Synthetic oligonucleotide
ctcaacttctactactaatt

SEQ ID NO: 1741 - DNA, 21 bp, Artificial sequence
  Synthetic oligonucleotide
tctcaacttctactactaatt

SEQ ID NO: 1742 - DNA, 21 bp, Artificial sequence
  Synthetic oligonucleotide
ctctcaacttctactactaat

SEQ ID NO: 1743 - DNA, 19 bp, Artificial sequence
  Synthetic oligonucleotide
ctcaacttctactactaat

SEQ ID NO: 1744 - DNA, 20 bp, Artificial sequence
  Synthetic oligonucleotide
tctcaacttctactactaat

SEQ ID NO: 1745 - DNA, 21 bp, Artificial sequence
  Synthetic oligonucleotide
tctctcaacttctactactaa

SEQ ID NO: 1746 - DNA, 18 bp, Artificial sequence
  Synthetic oligonucleotide
ctcaacttctactactaa

SEQ ID NO: 1747 - DNA, 19 bp, Artificial sequence
  Synthetic oligonucleotide
tctcaacttctactactaa

SEQ ID NO: 1748 - DNA, 17 bp, Artificial sequence
  Synthetic oligonucleotide
ctcaacttctactacta

SEQ ID NO: 1749 - DNA, 21 bp, Artificial sequence
  Synthetic oligonucleotide
ttctctcaacttctactacta

SEQ ID NO: 1750 - DNA, 20 bp, Artificial sequence
  Synthetic oligonucleotide
tctctcaacttctactacta

SEQ ID NO: 1751 - DNA, 18 bp, Artificial sequence
  Synthetic oligonucleotide
tctcaacttctactacta

SEQ ID NO: 1752 - DNA, 19 bp, Artificial sequence
  Synthetic oligonucleotide
ctctcaacttctactacta

SEQ ID NO: 1753 - DNA, 18 bp, Artificial sequence
  Synthetic oligonucleotide
ctctcaacttctactact

SEQ ID NO: 1754 - DNA, 17 bp, Artificial sequence
  Synthetic oligonucleotide
tctcaacttctactact

SEQ ID NO: 1755 - DNA, 19 bp, Artificial sequence
  Synthetic oligonucleotide
tctctcaacttctactact

SEQ ID NO: 1756 - DNA, 21 bp, Artificial sequence
  Synthetic oligonucleotide
tttctctcaacttctactact

SEQ ID NO: 1757 - DNA, 20 bp, Artificial sequence
  Synthetic oligonucleotide
ttctctcaacttctactact

SEQ ID NO: 1758 - DNA, 20 bp, Artificial sequence
  Synthetic oligonucleotide
tttctctcaacttctactac

SEQ ID NO: 1759 - DNA, 17 bp, Artificial sequence
  Synthetic oligonucleotide
ctctcaacttctactac

SEQ ID NO: 1760 - DNA, 19 bp, Artificial sequence
  Synthetic oligonucleotide
ttctctcaacttctactac

SEQ ID NO: 1761 - DNA, 21 bp, Artificial sequence
  Synthetic oligonucleotide
ttttctctcaacttctactac

SEQ ID NO: 1762 - DNA, 18 bp, Artificial sequence
  Synthetic oligonucleotide
tctctcaacttctactac

SEQ ID NO: 1763 - DNA, 19 bp, Artificial sequence
  Synthetic oligonucleotide
tttctctcaacttctacta

SEQ ID NO: 1764 - DNA, 20 bp, Artificial sequence
  Synthetic oligonucleotide
ttttctctcaacttctacta

SEQ ID NO: 1765 - DNA, 21 bp, Artificial sequence
  Synthetic oligonucleotide
tttttctctcaacttctacta

SEQ ID NO: 1766 - DNA, 17 bp, Artificial sequence
  Synthetic oligonucleotide
tctctcaacttctacta

SEQ ID NO: 1767 - DNA, 18 bp, Artificial sequence
  Synthetic oligonucleotide
ttctctcaacttctacta

SEQ ID NO: 1768 - DNA, 18 bp, Artificial sequence
  Synthetic oligonucleotide
tttctctcaacttctact

SEQ ID NO: 1769 - DNA, 19 bp, Artificial sequence
  Synthetic oligonucleotide
ttttctctcaacttctact

SEQ ID NO: 1770 - DNA, 21 bp, Artificial sequence
  Synthetic oligonucleotide
ctttttctctcaacttctact

SEQ ID NO: 1771 - DNA, 20 bp, Artificial sequence
  Synthetic oligonucleotide
tttttctctcaacttctact

SEQ ID NO: 1772 - DNA, 20 bp, Artificial sequence
  Synthetic oligonucleotide
ctttttctctcaacttctac

SEQ ID NO: 1773 - DNA, 21 bp, Artificial sequence
  Synthetic oligonucleotide
actttttctctcaacttctac

SEQ ID NO: 1774 - DNA, 18 bp, Artificial sequence
  Synthetic oligonucleotide
ttttctctcaacttctac

SEQ ID NO: 1775 - DNA, 19 bp, Artificial sequence
  Synthetic oligonucleotide
tttttctctcaacttctac

SEQ ID NO: 1776 - DNA, 19 bp, Artificial sequence
  Synthetic oligonucleotide
ctttttctctcaacttcta

SEQ ID NO: 1777 - DNA, 21 bp, Artificial sequence
  Synthetic oligonucleotide
tactttttctctcaacttcta

SEQ ID NO: 1778 - DNA, 20 bp, Artificial sequence
  Synthetic oligonucleotide
actttttctctcaacttcta

SEQ ID NO: 1779 - DNA, 18 bp, Artificial sequence
  Synthetic oligonucleotide
tttttctctcaacttcta

SEQ ID NO: 1780 - DNA, 20 bp, Artificial sequence
  Synthetic oligonucleotide
tactttttctctcaacttct

SEQ ID NO: 1781 - DNA, 21 bp, Artificial sequence
  Synthetic oligonucleotide
ttactttttctctcaacttct

SEQ ID NO: 1782 - DNA, 20 bp, Artificial sequence
  Synthetic oligonucleotide
ttactttttctctcaacttc

SEQ ID NO: 1783 - DNA, 19 bp, Artificial sequence
  Synthetic oligonucleotide
tactttttctctcaacttc

SEQ ID NO: 1784 - DNA, 18 bp, Artificial sequence
  Synthetic oligonucleotide
actttttctctcaacttc

SEQ ID NO: 1785 - DNA, 19 bp, Artificial sequence
  Synthetic oligonucleotide
ttactttttctctcaactt

SEQ ID NO: 1786 - DNA, 18 bp, Artificial sequence
  Synthetic oligonucleotide
tactttttctctcaactt

SEQ ID NO: 1787 - DNA, 18 bp, Artificial sequence
  Synthetic oligonucleotide
ttactttttctctcaact

SEQ ID NO: 1788 - DNA, 19 bp, Artificial sequence
  Synthetic oligonucleotide
gttactttttctctcaact

SEQ ID NO: 1789 - DNA, 18 bp, Artificial sequence
  Synthetic oligonucleotide
gttactttttctctcaac

SEQ ID NO: 1790 - DNA, 17 bp, Artificial sequence
  Synthetic oligonucleotide
gttactttttctctcaa

SEQ ID NO: 1791 - DNA, 18 bp, Artificial sequence
  Synthetic oligonucleotide
agttactttttctctcaa

SEQ ID NO: 1792 - DNA, 20 bp, Artificial sequence
  Synthetic oligonucleotide
cttttacattcccattaaca

SEQ ID NO: 1793 - DNA, 21 bp, Artificial sequence
  Synthetic oligonucleotide
cacttttacattcccattaac

SEQ ID NO: 1794 - DNA, 19 bp, Artificial sequence
  Synthetic oligonucleotide
cttttacattcccattaac

SEQ ID NO: 1795 - DNA, 20 bp, Artificial sequence
  Synthetic oligonucleotide
acttttacattcccattaac

SEQ ID NO: 1796 - DNA, 19 bp, Artificial sequence
  Synthetic oligonucleotide
acttttacattcccattaa

SEQ ID NO: 1797 - DNA, 18 bp, Artificial sequence
  Synthetic oligonucleotide
cttttacattcccattaa

SEQ ID NO: 1798 - DNA, 20 bp, Artificial sequence
  Synthetic oligonucleotide
cacttttacattcccattaa

SEQ ID NO: 1799 - DNA, 21 bp, Artificial sequence
  Synthetic oligonucleotide
tacacttttacattcccatta

SEQ ID NO: 1800 - DNA, 18 bp, Artificial sequence
  Synthetic oligonucleotide
acttttacattcccatta

SEQ ID NO: 1801 - DNA, 19 bp, Artificial sequence
  Synthetic oligonucleotide
cacttttacattcccatta

SEQ ID NO: 1802 - DNA, 20 bp, Artificial sequence
  Synthetic oligonucleotide
acacttttacattcccatta

SEQ ID NO: 1803 - DNA, 18 bp, Artificial sequence
  Synthetic oligonucleotide
cacttttacattcccatt

SEQ ID NO: 1804 - DNA, 20 bp, Artificial sequence
  Synthetic oligonucleotide
tacacttttacattcccatt

SEQ ID NO: 1805 - DNA, 19 bp, Artificial sequence
  Synthetic oligonucleotide
acacttttacattcccatt

SEQ ID NO: 1806 - DNA, 19 bp, Artificial sequence
  Synthetic oligonucleotide
tacacttttacattcccat

SEQ ID NO: 1807 - DNA, 18 bp, Artificial sequence
  Synthetic oligonucleotide
tacacttttacattccca

SEQ ID NO: 1808 - DNA, 19 bp, Artificial sequence
  Synthetic oligonucleotide
gtacacttttacattccca

SEQ ID NO: 1809 - DNA, 18 bp, Artificial sequence
  Synthetic oligonucleotide
gtacacttttacattccc

SEQ ID NO: 1810 - DNA, 17 bp, Artificial sequence
  Synthetic oligonucleotide
tacacttttacattccc

SEQ ID NO: 1811 - DNA, 19 bp, Artificial sequence
  Synthetic oligonucleotide
tgtacacttttacattccc

SEQ ID NO: 1812 - DNA, 18 bp, Artificial sequence
  Synthetic oligonucleotide
tgtacacttttacattcc

SEQ ID NO: 1813 - DNA, 18 bp, Artificial sequence
  Synthetic oligonucleotide
ctgtacacttttacattc

SEQ ID NO: 1814 - DNA, 18 bp, Artificial sequence
  Synthetic oligonucleotide
atcttatttacatcttcc

SEQ ID NO: 1815 - DNA, 19 bp, Artificial sequence
  Synthetic oligonucleotide
gaatcttatttacatcttc

SEQ ID NO: 1816 - DNA, 18 bp, Artificial sequence
  Synthetic oligonucleotide
gaatcttatttacatctt

SEQ ID NO: 1817 - DNA, 18 bp, Artificial sequence
  Synthetic oligonucleotide
tgaatcttatttacatct

SEQ ID NO: 1818 - DNA, 17 bp, Artificial sequence
  Synthetic oligonucleotide
attcagctttttcaatc

SEQ ID NO: 1819 - DNA, 20 bp, Artificial sequence
  Synthetic oligonucleotide
ttaattttcccttcactcct

SEQ ID NO: 1820 - DNA, 19 bp, Artificial sequence
  Synthetic oligonucleotide
ttaattttcccttcactcc

SEQ ID NO: 1821 - DNA, 18 bp, Artificial sequence
  Synthetic oligonucleotide
ttaattttcccttcactc

SEQ ID NO: 1822 - DNA, 19 bp, Artificial sequence
  Synthetic oligonucleotide
gttaattttcccttcactc

SEQ ID NO: 1823 - DNA, 21 bp, Artificial sequence
  Synthetic oligonucleotide
caaaattacttcttttatcat

SEQ ID NO: 1824 - DNA, 21 bp, Artificial sequence
  Synthetic oligonucleotide
ccaaaattacttcttttatca

SEQ ID NO: 1825 - DNA, 21 bp, Artificial sequence
  Synthetic oligonucleotide
tccaaaattacttcttttatc

SEQ ID NO: 1826 - DNA, 20 bp, Artificial sequence
  Synthetic oligonucleotide
tccaaaattacttcttttat

SEQ ID NO: 1827 - DNA, 19 bp, Artificial sequence
  Synthetic oligonucleotide
ccaaaattacttcttttat

SEQ ID NO: 1828 - DNA, 21 bp, Artificial sequence
  Synthetic oligonucleotide
ttccaaaattacttcttttat

SEQ ID NO: 1829 - DNA, 19 bp, Artificial sequence
  Synthetic oligonucleotide
tccaaaattacttctttta

SEQ ID NO: 1830 - DNA, 20 bp, Artificial sequence
  Synthetic oligonucleotide
ttccaaaattacttctttta

SEQ ID NO: 1831 - DNA, 19 bp, Artificial sequence
  Synthetic oligonucleotide
gttccaaaattacttcttt

SEQ ID NO: 1832 - DNA, 18 bp, Artificial sequence
  Synthetic oligonucleotide
gttccaaaattacttctt

SEQ ID NO: 1833 - DNA, 18 bp, Artificial sequence
  Synthetic oligonucleotide
tgttccaaaattacttct

SEQ ID NO: 1834 - DNA, 18 bp, Artificial sequence
  Synthetic oligonucleotide
atgttccaaaattacttc

SEQ ID NO: 1835 - DNA, 20 bp, Artificial sequence
  Synthetic oligonucleotide
catattttactctttttatt

SEQ ID NO: 1836 - DNA, 20 bp, Artificial sequence
  Synthetic oligonucleotide
ccatattttactctttttat

SEQ ID NO: 1837 - DNA, 21 bp, Artificial sequence
  Synthetic oligonucleotide
cccatattttactctttttat

SEQ ID NO: 1838 - DNA, 19 bp, Artificial sequence
  Synthetic oligonucleotide
catattttactctttttat

SEQ ID NO: 1839 - DNA, 20 bp, Artificial sequence
  Synthetic oligonucleotide
cccatattttactcttttta

SEQ ID NO: 1840 - DNA, 19 bp, Artificial sequence
  Synthetic oligonucleotide
ccatattttactcttttta

SEQ ID NO: 1841 - DNA, 21 bp, Artificial sequence
  Synthetic oligonucleotide
acccatattttactcttttta

SEQ ID NO: 1842 - DNA, 18 bp, Artificial sequence
  Synthetic oligonucleotide
ccatattttactcttttt

SEQ ID NO: 1843 - DNA, 19 bp, Artificial sequence
  Synthetic oligonucleotide
cccatattttactcttttt

SEQ ID NO: 1844 - DNA, 20 bp, Artificial sequence
  Synthetic oligonucleotide
acccatattttactcttttt

SEQ ID NO: 1845 - DNA, 21 bp, Artificial sequence
  Synthetic oligonucleotide
tacccatattttactcttttt

SEQ ID NO: 1846 - DNA, 20 bp, Artificial sequence
  Synthetic oligonucleotide
tacccatattttactctttt

SEQ ID NO: 1847 - DNA, 18 bp, Artificial sequence
  Synthetic oligonucleotide
cccatattttactctttt

SEQ ID NO: 1848 - DNA, 19 bp, Artificial sequence
  Synthetic oligonucleotide
acccatattttactctttt

SEQ ID NO: 1849 - DNA, 21 bp, Artificial sequence
  Synthetic oligonucleotide
ttacccatattttactctttt

SEQ ID NO: 1850 - DNA, 19 bp, Artificial sequence
  Synthetic oligonucleotide
tacccatattttactcttt

SEQ ID NO: 1851 - DNA, 18 bp, Artificial sequence
  Synthetic oligonucleotide
acccatattttactcttt

SEQ ID NO: 1852 - DNA, 20 bp, Artificial sequence
  Synthetic oligonucleotide
ttacccatattttactcttt

SEQ ID NO: 1853 - DNA, 21 bp, Artificial sequence
  Synthetic oligonucleotide
tttacccatattttactcttt

SEQ ID NO: 1854 - DNA, 19 bp, Artificial sequence
  Synthetic oligonucleotide
ttacccatattttactctt

SEQ ID NO: 1855 - DNA, 20 bp, Artificial sequence
  Synthetic oligonucleotide
tttacccatattttactctt

SEQ ID NO: 1856 - DNA, 17 bp, Artificial sequence
  Synthetic oligonucleotide
acccatattttactctt

SEQ ID NO: 1857 - DNA, 18 bp, Artificial sequence
  Synthetic oligonucleotide
tacccatattttactctt

SEQ ID NO: 1858 - DNA, 17 bp, Artificial sequence
  Synthetic oligonucleotide
tacccatattttactct

SEQ ID NO: 1859 - DNA, 18 bp, Artificial sequence
  Synthetic oligonucleotide
ttacccatattttactct

SEQ ID NO: 1860 - DNA, 19 bp, Artificial sequence
  Synthetic oligonucleotide
tttacccatattttactct

SEQ ID NO: 1861 - DNA, 17 bp, Artificial sequence
  Synthetic oligonucleotide
ttacccatattttactc

SEQ ID NO: 1862 - DNA, 18 bp, Artificial sequence
  Synthetic oligonucleotide
tttacccatattttactc

SEQ ID NO: 1863 - DNA, 19 bp, Artificial sequence
  Synthetic oligonucleotide
gtttacccatattttactc

SEQ ID NO: 1864 - DNA, 18 bp, Artificial sequence
  Synthetic oligonucleotide
gtttacccatattttact

SEQ ID NO: 1865 - DNA, 18 bp, Artificial sequence
  Synthetic oligonucleotide
tgtttacccatattttac

SEQ ID NO: 1866 - DNA, 17 bp, Artificial sequence
  Synthetic oligonucleotide
gtttacccatattttac

SEQ ID NO: 1867 - DNA, 17 bp, Artificial sequence
  Synthetic oligonucleotide
tgtttacccatatttta

SEQ ID NO: 1868 - DNA, 17 bp, Artificial sequence
  Synthetic oligonucleotide
ttcttgcttcaaccatc

SEQ ID NO: 1869 - DNA, 17 bp, Artificial sequence
  Synthetic oligonucleotide
gttacctccctttatat

SEQ ID NO: 1870 - DNA, 16 bp, Artificial sequence
  Synthetic oligonucleotide
ggttacctccctttat

SEQ ID NO: 1871 - DNA, 16 bp, Artificial sequence
  Synthetic oligonucleotide
aggttacctcccttta

SEQ ID NO: 1872 - DNA, 18 bp, Artificial sequence
  Synthetic oligonucleotide
atgttctctatctctata

SEQ ID NO: 1873 - DNA, 17 bp, Artificial sequence
  Synthetic oligonucleotide
tatgttctctatctcta

SEQ ID NO: 1874 - DNA, 17 bp, Artificial sequence
  Synthetic oligonucleotide
agatcaaactaaaacct

SEQ ID NO: 1875 - DNA, 17 bp, Artificial sequence
  Synthetic oligonucleotide
tgcccaatttcacccaa

SEQ ID NO: 1876 - DNA, 17 bp, Artificial sequence
  Synthetic oligonucleotide
tttgcccaatttcaccc

SEQ ID NO: 1877 - DNA, 17 bp, Artificial sequence
  Synthetic oligonucleotide
ttttgcccaatttcacc

SEQ ID NO: 1878 - DNA, 18 bp, Artificial sequence
  Synthetic oligonucleotide
tgtatatcaacaattcat

SEQ ID NO: 1879 - DNA, 20 bp, Artificial sequence
  Synthetic oligonucleotide
acatttctttaaaatttcca

SEQ ID NO: 1880 - DNA, 21 bp, Artificial sequence
  Synthetic oligonucleotide
cacatttctttaaaatttcca

SEQ ID NO: 1881 - DNA, 21 bp, Artificial sequence
  Synthetic oligonucleotide
ccacatttctttaaaatttcc

SEQ ID NO: 1882 - DNA, 20 bp, Artificial sequence
  Synthetic oligonucleotide
cacatttctttaaaatttcc

SEQ ID NO: 1883 - DNA, 19 bp, Artificial sequence
  Synthetic oligonucleotide
acatttctttaaaatttcc

SEQ ID NO: 1884 - DNA, 20 bp, Artificial sequence
  Synthetic oligonucleotide
ccacatttctttaaaatttc

SEQ ID NO: 1885 - DNA, 21 bp, Artificial sequence
  Synthetic oligonucleotide
accacatttctttaaaatttc

SEQ ID NO: 1886 - DNA, 20 bp, Artificial sequence
  Synthetic oligonucleotide
accacatttctttaaaattt

SEQ ID NO: 1887 - DNA, 20 bp, Artificial sequence
  Synthetic oligonucleotide
acaaaaccacatttctttaa

SEQ ID NO: 1888 - DNA, 18 bp, Artificial sequence
  Synthetic oligonucleotide
ctgttttcaaatcatttc

SEQ ID NO: 1889 - DNA, 19 bp, Artificial sequence
  Synthetic oligonucleotide
gaaccattactattatcaa

SEQ ID NO: 1890 - DNA, 19 bp, Artificial sequence
  Synthetic oligonucleotide
agaaccattactattatca

SEQ ID NO: 1891 - DNA, 18 bp, Artificial sequence
  Synthetic oligonucleotide
agaaccattactattatc

SEQ ID NO: 1892 - DNA, 18 bp, Artificial sequence
  Synthetic oligonucleotide
ctagaaccattactatta

SEQ ID NO: 1893 - DNA, 17 bp, Artificial sequence
  Synthetic oligonucleotide
tagaaccattactatta

SEQ ID NO: 1894 - DNA, 17 bp, Artificial sequence
  Synthetic oligonucleotide
ctagaaccattactatt

SEQ ID NO: 1895 - DNA, 19 bp, Artificial sequence
  Synthetic oligonucleotide
agattaccatctttcaaaa

SEQ ID NO: 1896 - DNA, 18 bp, Artificial sequence
  Synthetic oligonucleotide
agattaccatctttcaaa

SEQ ID NO: 1897 - DNA, 17 bp, Artificial sequence
  Synthetic oligonucleotide
agattaccatctttcaa

SEQ ID NO: 1898 - DNA, 17 bp, Artificial sequence
  Synthetic oligonucleotide
aagattaccatctttca

SEQ ID NO: 1899 - DNA, 18 bp, Artificial sequence
  Synthetic oligonucleotide
catgctcacacattttaa

SEQ ID NO: 1900 - DNA, 17 bp, Artificial sequence
  Synthetic oligonucleotide
cttaagctatctaaaca

SEQ ID NO: 1901 - DNA, 18 bp, Artificial sequence
  Synthetic oligonucleotide
tgaacaattcaacattca

SEQ ID NO: 1902 - DNA, 18 bp, Artificial sequence
  Synthetic oligonucleotide
gatcaaaaaactttccct

SEQ ID NO: 1903 - DNA, 19 bp, Artificial sequence
  Synthetic oligonucleotide
agatcaaaaaactttccct

SEQ ID NO: 1904 - DNA, 18 bp, Artificial sequence
  Synthetic oligonucleotide
agatcaaaaaactttccc

SEQ ID NO: 1905 - DNA, 17 bp, Artificial sequence
  Synthetic oligonucleotide
tcctagatcaaaaaact

SEQ ID NO: 1906 - DNA, 19 bp, Artificial sequence
  Synthetic oligonucleotide
attttttcttctcttttca

SEQ ID NO: 1907 - DNA, 20 bp, Artificial sequence
  Synthetic oligonucleotide
tattttttcttctcttttca

SEQ ID NO: 1908 - DNA, 20 bp, Artificial sequence
  Synthetic oligonucleotide
atattttttcttctcttttc

SEQ ID NO: 1909 - DNA, 18 bp, Artificial sequence
  Synthetic oligonucleotide
tctgctttaaaaactctc

SEQ ID NO: 1910 - DNA, 17 bp, Artificial sequence
  Synthetic oligonucleotide
ctctgctttaaaaactc

SEQ ID NO: 1911 - DNA, 19 bp, Artificial sequence
  Synthetic oligonucleotide
actacacaaacacattcaa

SEQ ID NO: 1912 - DNA, 21 bp, Artificial sequence
  Synthetic oligonucleotide
caaactacacaaacacattca

SEQ ID NO: 1913 - DNA, 21 bp, Artificial sequence
  Synthetic oligonucleotide
acaaactacacaaacacattc

SEQ ID NO: 1914 - DNA, 21 bp, Artificial sequence
  Synthetic oligonucleotide
caacaaactacacaaacacat

SEQ ID NO: 1915 - DNA, 21 bp, Artificial sequence
  Synthetic oligonucleotide
cacaacaaactacacaaacac

SEQ ID NO: 1916 - DNA, 21 bp, Artificial sequence
  Synthetic oligonucleotide
tcacaacaaactacacaaaca

SEQ ID NO: 1917 - DNA, 21 bp, Artificial sequence
  Synthetic oligonucleotide
ttcacaacaaactacacaaac

SEQ ID NO: 1918 - DNA, 21 bp, Artificial sequence
  Synthetic oligonucleotide
atttcacaacaaactacacaa

SEQ ID NO: 1919 - DNA, 21 bp, Artificial sequence
  Synthetic oligonucleotide
caatttcacaacaaactacac

SEQ ID NO: 1920 - DNA, 19 bp, Artificial sequence
  Synthetic oligonucleotide
tgtaacaatttcacaacaa

SEQ ID NO: 1921 - DNA, 18 bp, Artificial sequence
  Synthetic oligonucleotide
tgtaacaatttcacaaca

SEQ ID NO: 1922 - DNA, 17 bp, Artificial sequence
  Synthetic oligonucleotide
ttaagccaaccccacca

SEQ ID NO: 1923 - DNA, 17 bp, Artificial sequence
  Synthetic oligonucleotide
tttaagccaaccccacc

SEQ ID NO: 1924 - DNA, 17 bp, Artificial sequence
  Synthetic oligonucleotide
atttaagccaaccccac

SEQ ID NO: 1925 - DNA, 18 bp, Artificial sequence
  Synthetic oligonucleotide
ccagtaatacaaattata

SEQ ID NO: 1926 - DNA, 17 bp, Artificial sequence
  Synthetic oligonucleotide
cccagtaatacaaatta

SEQ ID NO: 1927 - DNA, 17 bp, Artificial sequence
  Synthetic oligonucleotide
tcccagtaatacaaatt

SEQ ID NO: 1928 - DNA, 17 bp, Artificial sequence
  Synthetic oligonucleotide
atcccagtaatacaaat

SEQ ID NO: 1929 - DNA, 17 bp, Artificial sequence
  Synthetic oligonucleotide
ctactagcatcaccact

SEQ ID NO: 1930 - DNA, 16 bp, Artificial sequence
  Synthetic oligonucleotide
ttctactagcatcacc

SEQ ID NO: 1931 - DNA, 16 bp, Artificial sequence
  Synthetic oligonucleotide
cttctactagcatcac

SEQ ID NO: 1932 - DNA, 21 bp, Artificial sequence
  Synthetic oligonucleotide
taaattactcattaaatccat

SEQ ID NO: 1933 - DNA, 21 bp, Artificial sequence
  Synthetic oligonucleotide
ataaattactcattaaatcca

SEQ ID NO: 1934 - DNA, 20 bp, Artificial sequence
  Synthetic oligonucleotide
taaattactcattaaatcca

SEQ ID NO: 1935 - DNA, 21 bp, Artificial sequence
  Synthetic oligonucleotide
cataaattactcattaaatcc

SEQ ID NO: 1936 - DNA, 18 bp, Artificial sequence
  Synthetic oligonucleotide
gatttatttttctactta

SEQ ID NO: 1937 - DNA, 21 bp, Artificial sequence
  Synthetic oligonucleotide
atacaacaaacaattcacttt

SEQ ID NO: 1938 - DNA, 19 bp, Artificial sequence
  Synthetic oligonucleotide
cgatacaacaaacaattca

SEQ ID NO: 1939 - DNA, 20 bp, Artificial sequence
  Synthetic oligonucleotide
gaacatccacactaacaaca

SEQ ID NO: 1940 - DNA, 18 bp, Artificial sequence
  Synthetic oligonucleotide
acatccacactaacaaca

SEQ ID NO: 1941 - DNA, 19 bp, Artificial sequence
  Synthetic oligonucleotide
gaacatccacactaacaac

SEQ ID NO: 1942 - DNA, 19 bp, Artificial sequence
  Synthetic oligonucleotide
tgaacatccacactaacaa

SEQ ID NO: 1943 - DNA, 19 bp, Artificial sequence
  Synthetic oligonucleotide
ttgaacatccacactaaca

SEQ ID NO: 1944 - DNA, 18 bp, Artificial sequence
  Synthetic oligonucleotide
tgaacatccacactaaca

SEQ ID NO: 1945 - DNA, 18 bp, Artificial sequence
  Synthetic oligonucleotide
cattgaacatccacacta

SEQ ID NO: 1946 - DNA, 17 bp, Artificial sequence
  Synthetic oligonucleotide
attgaacatccacacta

SEQ ID NO: 1947 - DNA, 17 bp, Artificial sequence
  Synthetic oligonucleotide
cattgaacatccacact

SEQ ID NO: 1948 - DNA, 17 bp, Artificial sequence
  Synthetic oligonucleotide
actcattgaacatccac

SEQ ID NO: 1949 - DNA, 20 bp, Artificial sequence
  Synthetic oligonucleotide
tatctttatttaataatctt

SEQ ID NO: 1950 - DNA, 17 bp, Artificial sequence
  Synthetic oligonucleotide
tctcaagcttcactcta

SEQ ID NO: 1951 - DNA, 19 bp, Artificial sequence
  Synthetic oligonucleotide
gacaatatattcctcaatc

SEQ ID NO: 1952 - DNA, 18 bp, Artificial sequence
  Synthetic oligonucleotide
gacaatatattcctcaat

SEQ ID NO: 1953 - DNA, 17 bp, Artificial sequence
  Synthetic oligonucleotide
tcctgtaacaattatac

SEQ ID NO: 1954 - DNA, 18 bp, Artificial sequence
  Synthetic oligonucleotide
acccagaataaaaaccac

SEQ ID NO: 1955 - DNA, 18 bp, Artificial sequence
  Synthetic oligonucleotide
ttccactttcttactccc

SEQ ID NO: 1956 - DNA, 17 bp, Artificial sequence
  Synthetic oligonucleotide
ttccactttcttactcc

SEQ ID NO: 1957 - DNA, 18 bp, Artificial sequence
  Synthetic oligonucleotide
tttccactttcttactcc

SEQ ID NO: 1958 - DNA, 17 bp, Artificial sequence
  Synthetic oligonucleotide
tttccactttcttactc

SEQ ID NO: 1959 - DNA, 17 bp, Artificial sequence
  Synthetic oligonucleotide
atccctttaccactttt

SEQ ID NO: 1960 - DNA, 18 bp, Artificial sequence
  Synthetic oligonucleotide
catccctttaccactttt

SEQ ID NO: 1961 - DNA, 18 bp, Artificial sequence
  Synthetic oligonucleotide
tcatccctttaccacttt

SEQ ID NO: 1962 - DNA, 17 bp, Artificial sequence
  Synthetic oligonucleotide
tcatccctttaccactt

SEQ ID NO: 1963 - DNA, 18 bp, Artificial sequence
  Synthetic oligonucleotide
ctcatccctttaccactt

SEQ ID NO: 1964 - DNA, 16 bp, Artificial sequence
  Synthetic oligonucleotide
gtctacatctaacccc

SEQ ID NO: 1965 - DNA, 17 bp, Artificial sequence
  Synthetic oligonucleotide
agtctacatctaacccc

SEQ ID NO: 1966 - DNA, 18 bp, Artificial sequence
  Synthetic oligonucleotide
cagtctacatctaacccc

SEQ ID NO: 1967 - DNA, 17 bp, Artificial sequence
  Synthetic oligonucleotide
cagtctacatctaaccc

SEQ ID NO: 1968 - DNA, 18 bp, Artificial sequence
  Synthetic oligonucleotide
tcagtctacatctaaccc

SEQ ID NO: 1969 - DNA, 16 bp, Artificial sequence
  Synthetic oligonucleotide
agtctacatctaaccc

SEQ ID NO: 1970 - DNA, 17 bp, Artificial sequence
  Synthetic oligonucleotide
tcagtctacatctaacc

SEQ ID NO: 1971 - DNA, 18 bp, Artificial sequence
  Synthetic oligonucleotide
ttcagtctacatctaacc

SEQ ID NO: 1972 - DNA, 17 bp, Artificial sequence
  Synthetic oligonucleotide
ttcagtctacatctaac

SEQ ID NO: 1973 - DNA, 17 bp, Artificial sequence
  Synthetic oligonucleotide
tttcagtctacatctaa

SEQ ID NO: 1974 - DNA, 19 bp, Artificial sequence
  Synthetic oligonucleotide
agttttaaccacacctcct

SEQ ID NO: 1975 - DNA, 17 bp, Artificial sequence
  Synthetic oligonucleotide
gttttaaccacacctcc

SEQ ID NO: 1976 - DNA, 18 bp, Artificial sequence
  Synthetic oligonucleotide
agttttaaccacacctcc

SEQ ID NO: 1977 - DNA, 17 bp, Artificial sequence
  Synthetic oligonucleotide
agttttaaccacacctc

SEQ ID NO: 1978 - DNA, 16 bp, Artificial sequence
  Synthetic oligonucleotide
gagttttaaccacacc

SEQ ID NO: 1979 - DNA, 18 bp, Artificial sequence
  Synthetic oligonucleotide
cagatcttctctttattt

SEQ ID NO: 1980 - DNA, 19 bp, Artificial sequence
  Synthetic oligonucleotide
tgttttcaacaaaacatca

SEQ ID NO: 1981 - DNA, 18 bp, Artificial sequence
  Synthetic oligonucleotide
tgttttcaacaaaacatc

SEQ ID NO: 1982 - DNA, 18 bp, Artificial sequence
  Synthetic oligonucleotide
ctgttttcaacaaaacat

SEQ ID NO: 1983 - DNA, 18 bp, Artificial sequence
  Synthetic oligonucleotide
tctgttttcaacaaaaca

SEQ ID NO: 1984 - DNA, 18 bp, Artificial sequence
  Synthetic oligonucleotide
atctttctaaaacttacc

SEQ ID NO: 1985 - DNA, 18 bp, Artificial sequence
  Synthetic oligonucleotide
cagaatctttctaaaact

SEQ ID NO: 1986 - DNA, 17 bp, Artificial sequence
  Synthetic oligonucleotide
ctacagaatctttctaa

SEQ ID NO: 1987 - DNA, 19 bp, Artificial sequence
  Synthetic oligonucleotide
atttccctttatttccctt

SEQ ID NO: 1988 - DNA, 18 bp, Artificial sequence
  Synthetic oligonucleotide
gtatttccctttatttcc

SEQ ID NO: 1989 - DNA, 21 bp, Artificial sequence
  Synthetic oligonucleotide
cattcaaatatatacattttt

SEQ ID NO: 1990 - DNA, 20 bp, Artificial sequence
  Synthetic oligonucleotide
cattcaaatatatacatttt

SEQ ID NO: 1991 - DNA, 20 bp, Artificial sequence
  Synthetic oligonucleotide
ccattcaaatatatacattt

SEQ ID NO: 1992 - DNA, 20 bp, Artificial sequence
  Synthetic oligonucleotide
atccattcaaatatatacat

SEQ ID NO: 1993 - DNA, 21 bp, Artificial sequence
  Synthetic oligonucleotide
tttatccattcaaatatatac

SEQ ID NO: 1994 - DNA, 19 bp, Artificial sequence
  Synthetic oligonucleotide
ttatccattcaaatatata

SEQ ID NO: 1995 - DNA, 20 bp, Artificial sequence
  Synthetic oligonucleotide
tttatccattcaaatatata

SEQ ID NO: 1996 - DNA, 21 bp, Artificial sequence
  Synthetic oligonucleotide
aattaacatcatttatcacta

SEQ ID NO: 1997 - DNA, 18 bp, Artificial sequence
  Synthetic oligonucleotide
ttaacatcatttatcact

SEQ ID NO: 1998 - DNA, 20 bp, Artificial sequence
  Synthetic oligonucleotide
aattaacatcatttatcact

SEQ ID NO: 1999 - DNA, 19 bp, Artificial sequence
  Synthetic oligonucleotide
ctaattaacatcatttatc

SEQ ID NO: 2000 - DNA, 20 bp, Artificial sequence
  Synthetic oligonucleotide
ccctaattaacatcatttat

SEQ ID NO: 2001 - DNA, 16 bp, Artificial sequence
  Synthetic oligonucleotide
atcagtccaacataac

SEQ ID NO: 2002 - DNA, 17 bp, Artificial sequence
  Synthetic oligonucleotide
tatcagtccaacataac

SEQ ID NO: 2003 - DNA, 19 bp, Artificial sequence
  Synthetic oligonucleotide
cttcattataccatcaaat

SEQ ID NO: 2004 - DNA, 20 bp, Artificial sequence
  Synthetic oligonucleotide
ttcttcattataccatcaaa

SEQ ID NO: 2005 - DNA, 20 bp, Artificial sequence
  Synthetic oligonucleotide
aaatattttcttcattatac

SEQ ID NO: 2006 - DNA, 21 bp, Artificial sequence
  Synthetic oligonucleotide
aattttccttcatctacttct

SEQ ID NO: 2007 - DNA, 20 bp, Artificial sequence
  Synthetic oligonucleotide
ttacaaaataatccaaactt

SEQ ID NO: 2008 - DNA, 19 bp, Artificial sequence
  Synthetic oligonucleotide
tacaaaataatccaaactt

SEQ ID NO: 2009 - DNA, 18 bp, Artificial sequence
  Synthetic oligonucleotide
acaaaataatccaaactt

SEQ ID NO: 2010 - DNA, 18 bp, Artificial sequence
  Synthetic oligonucleotide
tacaaaataatccaaact

SEQ ID NO: 2011 - DNA, 19 bp, Artificial sequence
  Synthetic oligonucleotide
ttacaaaataatccaaact

SEQ ID NO: 2012 - DNA, 19 bp, Artificial sequence
  Synthetic oligonucleotide
gttacaaaataatccaaac

SEQ ID NO: 2013 - DNA, 19 bp, Artificial sequence
  Synthetic oligonucleotide
tgttacaaaataatccaaa

SEQ ID NO: 2014 - DNA, 18 bp, Artificial sequence
  Synthetic oligonucleotide
tttcctcctcaatcaatc

SEQ ID NO: 2015 - DNA, 17 bp, Artificial sequence
  Synthetic oligonucleotide
ttcctcctcaatcaatc

SEQ ID NO: 2016 - DNA, 18 bp, Artificial sequence
  Synthetic oligonucleotide
ctttcctcctcaatcaat

SEQ ID NO: 2017 - DNA, 18 bp, Artificial sequence
  Synthetic oligonucleotide
actttcctcctcaatcaa

SEQ ID NO: 2018 - DNA, 18 bp, Artificial sequence
  Synthetic oligonucleotide
agctctttccaaattctc

SEQ ID NO: 2019 - DNA, 19 bp, Artificial sequence
  Synthetic oligonucleotide
tcaacttctactactaatt

SEQ ID NO: 2020 - DNA, 18 bp, Artificial sequence
  Synthetic oligonucleotide
caacttctactactaatt

SEQ ID NO: 2021 - DNA, 18 bp, Artificial sequence
  Synthetic oligonucleotide
tcaacttctactactaat

SEQ ID NO: 2022 - DNA, 21 bp, Artificial sequence
  Synthetic oligonucleotide
acttttacattcccattaaca

SEQ ID NO: 2023 - DNA, 21 bp, Artificial sequence
  Synthetic oligonucleotide
acacttttacattcccattaa

SEQ ID NO: 2024 - DNA, 19 bp, Artificial sequence
  Synthetic oligonucleotide
gtatacatttatcaaaaaa

SEQ ID NO: 2025 - DNA, 18 bp, Artificial sequence
  Synthetic oligonucleotide
aatcttatttacatcttc

SEQ ID NO: 2026 - DNA, 17 bp, Artificial sequence
  Synthetic oligonucleotide
gaatcttatttacatct

SEQ ID NO: 2027 - DNA, 17 bp, Artificial sequence
  Synthetic oligonucleotide
tgaatcttatttacatc

SEQ ID NO: 2028 - DNA, 20 bp, Artificial sequence
  Synthetic oligonucleotide
aaaattacttcttttatcat

SEQ ID NO: 2029 - DNA, 20 bp, Artificial sequence
  Synthetic oligonucleotide
caaaattacttcttttatca

SEQ ID NO: 2030 - DNA, 19 bp, Artificial sequence
  Synthetic oligonucleotide
aaaattacttcttttatca

SEQ ID NO: 2031 - DNA, 19 bp, Artificial sequence
  Synthetic oligonucleotide
atattttactctttttatt

SEQ ID NO: 2032 - DNA, 18 bp, Artificial sequence
  Synthetic oligonucleotide
gaaccattactattatca

SEQ ID NO: 2033 - DNA, 17 bp, Artificial sequence
  Synthetic oligonucleotide
gaaccattactattatc

SEQ ID NO: 2034 - DNA, 18 bp, Artificial sequence
  Synthetic oligonucleotide
tagaaccattactattat

SEQ ID NO: 2035 - DNA, 17 bp, Artificial sequence
  Synthetic oligonucleotide
agaaccattactattat

SEQ ID NO: 2036 - DNA, 17 bp, Artificial sequence
  Synthetic oligonucleotide
atcaaaaaactttccct

SEQ ID NO: 2037 - DNA, 17 bp, Artificial sequence
  Synthetic oligonucleotide
agatcaaaaaactttcc

SEQ ID NO: 2038 - DNA, 18 bp, Artificial sequence
  Synthetic oligonucleotide
tagatcaaaaaactttcc

SEQ ID NO: 2039 - DNA, 17 bp, Artificial sequence
  Synthetic oligonucleotide
atcctagatcaaaaaac

SEQ ID NO: 2040 - DNA, 18 bp, Homo sapiens
ttgatggtataatgaaga

SEQ ID NO: 2041 - DNA, 17 bp, Homo sapiens
gggaatgtaaaagtgta

SEQ ID NO: 2042 - DNA, 31 bp, artificial
  Probe
agcctaagatgagagttcaagttgagtttgg

SEQ ID NO: 2043 - DNA, 21 bp, artificial
  Primer
gcgatgtcaataggactccag

SEQ ID NO: 2044 - DNA, 22 bp, artificial
  Primer
ttgttgtaggatatgcccttga
